(19) United States
(12) Patent Application Publication
(10) Pub. No.: US 2022/0324933 A1
(43) Pub. Date: Oct. 13, 2022

(54) IL-2 COMPOSITIONS AND METHODS OF USE THEREOF

(71) Applicant: PROVIVA THERAPEUTICS (HONG KONG) LIMITED, Admiralty, Hong Kong (CN)

(72) Inventor: Zijuan LI, Shanghai (CN)

(21) Appl. No.: 17/626,365

(22) PCT Filed: Jul. 10, 2020
(86) PCT No.: PCT/US2020/041543

§ 371 Date: Jan. 11, 2022

Related U.S. Application Data
(60) Provisional application No. 62/873,399, filed on Jul. 12, 2019.
(60) Provisional application No. 62/908,782, filed on Oct. 1, 2019.

(51) Int. Cl. C07K 14/55; C07K 14/715; C07K 16/24

(52) U.S. Cl. CPC C07K 14/55; C07K 14/7155; C07K 16/246; C07K 2319/30; C07K 2319/32; C07K 2317/31; A61K 38/00

(57) ABSTRACT

Provided are activatable proprotein homodimers, comprising at least two separate polypeptide chains, each chain comprising an IL-2 protein a cleavable linker, and an IL-2 binding protein, among other optional features, and related pharmaceutical compositions and methods of use thereof.

### CROSS-REFERENCE TO RELATED APPLICATIONS

[0001] This application claims the benefit under 35 U.S.C. § 119(e) to U.S. Provisional Application No. 62/908,782, filed Oct. 1, 2019; and U.S. Provisional Application No. 62/873,399, filed Jul. 12, 2019, each of which is incorporated by reference in its entirety.

### STATEMENT REGARDING THE SEQUENCE LISTING

[0002] The Sequence Listing associated with this application is provided in text format in lieu of a paper copy, and is hereby incorporated by reference into the specification. The name of the text file containing the Sequence Listing is PRVA_003_02WO_ST25.txt. The text file is about 952 KB, created on Jul. 9, 2020, and is being submitted electronically via EFS-Web.

### BACKGROUND

### Technical Field

[0003] The present disclosure relates to an activatable proprotein homodimer comprising at least two separate polypeptide chains, each chain comprising an IL-2 protein, a cleavable linker, and an IL-2 binding protein, among other optional features, and related pharmaceutical compositions and methods of use thereof.

### Description of the Related Art

[0004] Interleukin-2 (IL-2) immunotherapy has proven utility in the treatment of cancers such as malignant melanoma and renal cell cancer, and chronic infections such as HIV infections.

[0005] However, there are certain problems associated with most IL-2 therapies. For example, current forms of IL-2 therapy have a short half-life in circulation and predominantly expand immunosuppressive regulatory T cells, or T_{regs} (see, for example, Arenas-Ramirez et al., Trends in Immunology. 36: 763-777, 2015). Also, the effects of IL-2 therapy are predominantly systemic, rather than being localized to target tissues, resulting in many severe side effects such as breathing problems, nausea, low blood pressure, loss of appetite, confusion, serious infections, seizures, allergic reactions, heart problems, renal failure, and vascular leak syndrome. Nonetheless, IL-2 therapy can be effective, and there is an unmet need in the art to overcome these and other drawbacks.

[0006] Embodiments of the present disclosure address these problems and more by providing an activatable proprotein comprising IL-2 that can be activated within a disease tissue, for example, a cancer tissue or tumor.

### BRIEF SUMMARY

[0007] Embodiments of the present disclosure include an activatable proprotein homodimer, comprising a first polypeptide and a second polypeptide, wherein:

[0008] (a) the first polypeptide and the second polypeptide comprise, in an N- to C-terminal orientation, or a C- to N-terminal orientation, a binding moiety, a first linker, an IL-2 protein, a second linker, and an IL-2 binding protein; or

[0009] (b) the first polypeptide and the second polypeptide comprise, in an N- to C-terminal orientation, or a C- to N-terminal orientation, a binding moiety, a first linker, an IL-2 binding protein, a second linker, and an IL-2 protein,

[0010] wherein the binding moiety of the first polypeptide binds to the binding moiety of the second polypeptide, wherein the IL-2 protein of the first polypeptide binds to the IL-2 binding protein of the second polypeptide, and wherein the IL-2 binding protein of the first polypeptide binds to the IL-2 protein of the second polypeptide, wherein said (collective) binding masks a binding site of IL-2 protein(s) that otherwise binds to an IL-2Rβ/γc and/or IL-2Rα/β/γc chain present on the surface of an immune cell in vitro or in vivo, and wherein at least one of the first or the second linker is a cleavable linker; or

[0011] (c) the first and the second polypeptide comprise, in an N- to C-terminal orientation, or a C- to N-terminal orientation, an IL-2 protein, a first linker, an IL-2 binding protein, a second linker, and an affinity purification tag; or

[0012] (d) the first and the second polypeptide comprise, in an N- to C-terminal orientation, or a C- to N-terminal orientation, an IL-2 binding protein, a first linker, an IL-2 protein, a second linker, and an affinity purification tag,

[0013] wherein the IL-2 protein of the first polypeptide binds to the IL-2 binding protein of the second polypeptide, and wherein the IL-2 binding protein of the first polypeptide binds to the IL-2 protein of the second polypeptide, wherein said (collective) binding masks a binding site of IL-2 protein(s) that otherwise binds to an IL-2Rβ/γc and/or IL-2Rα/β/γc chain present on the surface of an immune cell in vitro or in vivo, and wherein the first linker is a cleavable linker.

[0014] In some embodiments, the first and second IL-2 proteins comprise, consist, or consist essentially of an amino acid sequence that is at least 80, 85, 90, 95, 98, or 100% identical to an amino acid sequence selected from Table S1, optionally amino acids 21-153 of SEQ ID NO: 1 (full-length wild-type human IL-2), optionally comprising a C145X (X is any amino acid) or a C145S substitution as defined by SEQ ID NO: 1. In some embodiments, the first and second IL-2 proteins comprise, consist, or consist essentially of an amino acid sequence that is at least 80, 85, 90, 95, 98, or 100% identical to SEQ ID NO: 2 (mature human IL-2 with C125S substitution), optionally wherein the IL-2 protein retains the S125 residue as defined by SEQ ID NO: 2. In some embodiments, the first and second IL-2 proteins comprise one or more substitutions selected from K35C, R38C, T41C, F42C, E61C, and V69C as defined by SEQ ID NO: 2.

[0015] In some embodiments, the first IL-2 protein forms a disulfide bond with the second IL-2 binding protein, and wherein the second IL-2 protein forms a disulfide bond with the first IL-2 binding protein, optionally via one or more of the cysteines in claim 4 and one or more cysteines in the first and second IL-2 binding proteins(s).

[0016] In some embodiments, the first and second IL-2 proteins comprise one or more amino acid substitutions at position 69, 74, and/or 128 as defined by SEQ ID NO: 2, optionally wherein the one or more amino acid substitutions are selected from V69A, Q74P, and I128T as defined by SEQ ID NO: 2. In some embodiments, the first and second IL-2 proteins comprise one or more amino acid substitutions at position T3, R38, F42, Y45, E61, E62, E68, and/or L72 as defined by SEQ ID NO: 2, optionally wherein the one or more amino acid substitutions are selected from T3A; R38A and R38K; F42A, F42G, F42S, F42T, F42Q, F42E, F42N, F42D, F42R, F42K, and F42I; Y45A, Y45G, Y45S, Y45T, Y45Q, Y45E, Y45N, Y45D, Y45R, and Y45K; E61S; E62A and E62L; E68A and E68V; and L72A, L72G, L72S, L72T, L72Q, L72E, L72N, L72D, L72R, and L72K, including combinations thereof, optionally a combination selected from F42A, Y45A, and L72G; R38K, F42Q, Y45N, E62L, and E68V; R38K, F42Q, Y45E, and E68V; R38A, F42I, Y45N, E62L, and E68V; R38K, F42K, Y45R, E62L, and E68V; R38K, F42I, Y45E, and E68V; and R38A, F42A, Y45A, and E62A.

[0017] In some embodiments, the first and second IL-2 proteins comprise, consist, or consist essentially of an amino acid sequence that is at least 80, 85, 90, 95, 98, or 100% identical to SEQ ID NO: 3 (mature human IL-2 “D10” variant), optionally wherein the IL-2 protein retains any one or more of the Q74H, L80F, R81D, L85V, I86V, and/or I92F substitutions as defined by SEQ ID NO: 3.

[0018] In some embodiments, the first and second IL-2 binding proteins comprise a first and second IL-2Rα protein, or a first and second antibody or antigen binding fragment thereof that specifically binds to the IL-2 protein(s), optionally a bi-specific antibody or antigen binding fragment thereof.

[0019] In some embodiments, the first and second IL-2Rα proteins comprise, consist, or consist essentially of an amino acid sequence that is at least 80, 85, 90, 95, 98, or 100% to an amino acid sequence selected from Table S2, optionally amino acids 22-187 of SEQ ID NO: 4 (full-length wild-type human IL-2Rα). In some embodiments, the first and second IL-2Rα proteins comprise one or more cysteine substitutions selected from D4C, D6C, N27C, K38C, S39C, L42C, Y43C, I118C, and H120C as defined by SEQ ID NO: 6 (human IL-2Rα Sushi 1 to Sushi 2 domain), and/or a K38S substitution. In some embodiments, the first IL-2Rα protein forms a disulfide bond with the second IL-2 protein, and wherein the second IL-2Rα protein forms a disulfide bond with the first IL-2 protein, optionally via one or more of the cysteines in claim 11 and one or more cysteines in the IL-2 protein, optionally one or more of the cysteines in claim 4, optionally one or more cysteine pairs selected from IL2-K35C and IL2Rα-D4C, IL2-R38C and IL2Rα-D6C, IL2-R38C and IL2Rα-H120C, IL2-T41C and IL2Rα-I118C, IL2-F42C and IL2Rα-N27C, IL2-E61C and IL2Rα-K38C, IL2-E61C and IL2Rα-S39C, and IL2-V69C and IL2Rα-L42C, wherein disulfide binding between the IL-2 protein and the IL-2Rα protein masks the binding site of the IL-2 protein that preferentially binds to the IL-2Rα/β/γc chain expressed on T_{regs}. In some embodiments, first and second IL-2Rα proteins comprise an alanine substitution at position 49 and/or 68 as defined by SEQ ID NO: 6.

[0020] In some embodiments, the first and second antibody or antigen binding fragment thereof that specifically binds to the IL-2 protein is selected from one or more of a whole antibody, Fab, Fab′, F(ab′)2, monospecific Fab2, bispecific Fab2, FV, single chain Fv (scFv), scFV-Fc, nanobody, diabody, camelid, and a minibody, optionally wherein the antibody is NARA1 or an antigen binding fragment thereof. In some embodiments, the binding moieties of (a) and/or (b) do not bind to the IL-2 protein or the IL-2 binding protein. In some embodiments, the binding moieties of (a) and/or (b) bind to the IL-2 protein. In some embodiments, the binding moieties of the first polypeptide and the second polypeptide of (a) and/or (b) bind together, optionally homodimerize, via at least one non-covalent interaction. In some embodiments, the binding moieties of the first polypeptide and the second polypeptide of (a) and/or (b) bind together, optionally homodimerize, via at least one covalent bond. In some embodiments, the at least one covalent bond comprises at least one disulfide bond.

[0021] In some embodiments, the binding moieties of the first polypeptide and the second polypeptide of (a) and/or (b) are selected from Table M1. In some embodiments, the binding moieties of the first polypeptide and the second polypeptide of (a) or (b) comprise an antigen binding domain of an immunoglobulin, including antigen binding fragments and variants thereof. In some embodiments, the binding moieties of the first polypeptide and the second polypeptide of (a) and/or (b) comprise a CH1, CH2, CH3, CH1CH3, CH2CH3, CH1CH2CH3, and/or CL domain of an immunoglobulin, including fragments and variants thereof. In some embodiments, the binding moieties of the first polypeptide and the second polypeptide of (a) and/or (b) comprise, in an N- to C-terminal orientation: (1) an antigen binding domain of an immunoglobulin, including antigen binding fragments and variants thereof; and (2) a CH1, CH2, CH3, CH1CH3, CH2CH3, CH1CH2CH3, and/or CL domain of an immunoglobulin, including fragments and variants thereof. In some embodiments, the antigen binding domain comprises a VH or VL domain of an immunoglobulin, including antigen binding fragments and variants thereof. In some embodiments, the binding moieties of the first polypeptide and the second polypeptide of (a) and/or (b) do not bind to an antigen. In some embodiments, the binding moieties of the first polypeptide and the second polypeptide of (a) and/or (b) comprise a CH2CH3 domain of an immunoglobulin. In some embodiments, the immunoglobulin is from an immunoglobulin class selected from IgG1, IgG2, IgG3, IgG4, IgA, IgD, IgE, and IgM. In some embodiments, the binding moieties of the first polypeptide and the second polypeptide of (a) and/or (b) comprise a leucine zipper peptide.

[0022] In some embodiments, the affinity purification tag of (c) and/or (d) is selected from a polyhistidine tag (optionally hexahistidine tag), a VSV-G tag, a universal tag, a Strep-tag, an S-tag, an S1-tag, a Phe-tag, a Cys-tag, an Asp-tag, an Arg-tag, a Myc epitope tag, a KT3 epitope tag, an HSV epitope tag, a histidine affinity tag, a hemagglutinin (HA) tag, a FLAG epitope tag, an E2 epitope tag, a V5-tag, a T7-tag, an AU5 epitope tag, and an AU1 epitope tag.

[0023] In some embodiments, the cleavable linker comprises a protease cleavage site, optionally wherein the cleavable linker is selected from Table S3. In some embodiments, the protease cleavage site is cleavable by a protease selected from one or more of a metalloprotease, a serine protease, a cysteine protease, and an aspartic acid protease. In some embodiments, the protease cleavage site is cleavable by a protease selected from one or more of MMP1, MMP2, MMP3, MMP4, MMP5, MMP6, MMP7, MMP8, MMP9, MMP10, MMP11, MMP12, MMP13, MMP14, TEV protease, matriptase, uPA, FAP, Legumain, PSA, Kallikrein, Cathepsin A, and Cathepsin B. In some embodiments, the first linker and/or the second linker are about 1-50, 1-40, 1-30, 1-20, 1-10, 1-5, 1-4, 1-3 amino acids in length, or about 1, 2, 3, 4, 5, 6, 7, 8, 9, 10, 11, 12, 13, 14, 15, 16 ,17, 18, 19, 20, 21, 22, 23, 24, 25, 26, 27, 28, 29, 30, 31, 32, 33, 34, 35, 36, 37, 38, 39, 40, 41, 42, 43, 44, 45, 46, 47, 48, 49, 50 amino acids in length.

[0024] In some embodiments, the first linker of (a) and/or (b) is a cleavable linker, and wherein the second linker of (a) and/or (b) is a non-cleavable linker. In some embodiments, cleavage, optionally protease cleavage, of the first linker of (a) and/or (b) exposes the binding site(s) of the first and/or second IL-2 proteins that bind to the IL-2Rβ/γc chain present on the surface of the immune cell in vitro or in vivo. In some embodiments, the first linker of (a) and/or (b) is a non-cleavable linker, and wherein the second linker of (a) and/or (b) is a cleavable linker. In some embodiments, cleavage, optionally protease cleavage, of the second linker of (a) and/or (b) exposes the binding site(s) of the first and/or second IL-2 proteins that bind to the IL-2Rβ/γc chain present on the surface of the immune cell in vitro or in vivo. In some embodiments, cleavage, optionally protease cleavage, of the first linker of (c) and/or (d) exposes the binding site(s) of the first and/or second IL-2 proteins that bind to the IL-2Rβ/γc chain present on the surface of the immune cell in vitro or in vivo. In some embodiments, the immune cell is selected from one or more of a T cell, a B cell, a natural killer cell, a monocyte, and a macrophage.

[0025] In some embodiments, the first polypeptide and the second polypeptide of (a) comprise, in an N- to C-terminal orientation, the binding moiety, the first linker, the IL-2 protein, the second linker, and the IL-2 binding protein. In some embodiments, the first polypeptide and the second polypeptide of (a) comprise, in an N- to C-terminal orientation, the IL-2 binding protein, the first linker, the IL-2 protein, the second linker, and the binding moiety. In some embodiments, the first polypeptide and the second polypeptide of (b) comprise, in an N- to C-terminal orientation, the binding moiety, the first linker, the IL-2 binding protein, the second linker, and the IL-2 protein. In some embodiments, the first polypeptide and the second polypeptide of (b) comprise, in an N- to C-terminal orientation, the IL-2 protein, the first linker, the IL-2 binding protein, the second linker, and the binding moiety. In some embodiments, the first polypeptide and the second polypeptide of (c) comprise, in an N- to C-terminal orientation, the IL-2 protein, the first linker, the IL-2 binding protein, the second linker, and the affinity purification tag. In some embodiments, the first polypeptide and the second polypeptide of (d) comprise, in an N- to C-terminal orientation, the IL-2 binding protein, the first linker, the IL-2 protein, the second linker, and the affinity purification tag.

[0026] In some embodiments, the first polypeptide and the second polypeptide comprise, consist, or consist essentially of an amino acid sequence that is at least 80, 85, 90, 95, 98, or 100% identical to a sequence selected from Table S4, optionally wherein the TEV protease cleavage site is replaced with cleavage site cleavable by a human protease, optionally a cleavable linker selected from Table S3.

[0027] In some embodiments, the activatable proprotein is substantially in homodimeric form in a physiological solution, or under physiological conditions, optionally in vivo conditions.

[0028] Also included are recombinant nucleic acid molecules encoding an activatable proprotein homodimer described herein, vectors comprising the recombinant nucleic acid molecules described herein, and host cells comprising the recombinant nucleic acid molecules or the vectors described herein.

[0029] Also included are methods of producing an activatable proprotein, comprising culturing a host cell described herein under culture conditions suitable for the expression of the activatable proprotein homodimer, and isolating the activatable proprotein from the culture.

[0030] Also included are pharmaceutical compositions, comprising an activatable proprotein homodimer described herein, and a pharmaceutically acceptable carrier.

[0031] Certain embodiments include methods of treating disease in a subject, and/or a method of enhancing an immune response in a subject, comprising administering to the subject a therapeutically effective amount of the pharmaceutical composition described herein.

[0032] In some embodiments, the disease is selected from one or more of a cancer, a viral infection, and an immune disorder. In some embodiments, the cancer is a primary cancer or a metastatic cancer, and is selected from one or more of melanoma (optionally metastatic melanoma), kidney cancer (optionally renal cell carcinoma), pancreatic cancer, bone cancer, prostate cancer, small cell lung cancer, non-small cell lung cancer (NSCLC), mesothelioma, leukemia (optionally lymphocytic leukemia, chronic myelogenous leukemia, acute myeloid leukemia, or relapsed acute myeloid leukemia), multiple myeloma, lymphoma, hepatoma (hepatocellular carcinoma), sarcoma, B-cell malignancy, breast cancer, ovarian cancer, colorectal cancer, glioma, glioblastoma multiforme, meningioma, pituitary adenoma, vestibular schwannoma, primary CNS lymphoma, primitive neuroectodermal tumor (medulloblastoma), bladder cancer, uterine cancer, esophageal cancer, brain cancer, head and neck cancers, cervical cancer, testicular cancer, thyroid cancer, and stomach cancer.

[0033] In some embodiments, following administration, the activatable proprotein homodimer is activated through protease cleavage in a cell or tissue, optionally a cancer cell or cancer tissue, which exposes the binding site(s) of the first and/or second IL-2 proteins that bind to the IL-2Rβ/γc chain present on the surface of the immune cell in vitro or in vivo, and thereby generates an activated protein. In some embodiments, the activated protein binds via the IL-2 protein to the IL-2Rβ/γc chain present on the surface of an immune cell in vitro or in vivo. In some embodiments, the immune cell is selected from one or more of a T cell, a B cell, a natural killer cell, a monocyte, and a macrophage. In some embodiments, binding between the IL-2 protein(s) and the IL-2 binding protein(s) (optionally disulfide binding between the IL-2 protein(s) and the IL-2Rα protein(s)) in the activated protein masks the binding site of the IL-2 protein(s) that binds to the IL-2Rα/β/γc chain expressed on T_{regs}, and thereby interferes with binding of the activated protein to T_{regs}.

[0034] In some embodiments, administration and activation of the activatable proprotein increases an immune response in the subject by about or at least about 5, 10, 15, 20, 25, 30, 35, 40, 45, 50, 60, 70, 80, 90, 100, 200, 300, 400, 500, 600, 700, 800, 900, 1000, 2000% or more, relative to a control, optionally wherein the immune response is an anti-cancer or anti-viral immune response. In some embodiments, administration and activation of the activatable proprotein increases cell-killing in the subject by about or at least about 5, 10, 15, 20, 25, 30, 35, 40, 45, 50, 60, 70, 80, 90, 100, 200, 300, 400, 500, 600, 700, 800, 900, 1000, 2000% or more, relative to a control, optionally wherein the cell-killing is cancer cell-killing or virally-infected cell-killing.

[0035] In some embodiments, the viral infection is selected from one or more of human immunodeficiency virus (HIV), Hepatitis A, Hepatitis B, Hepatitis C, Hepatitis E, Caliciviruses associated diarrhoea, Rotavirus diarrhoea, Haemophilus influenzae B pneumonia and invasive disease, influenza, measles, mumps, rubella, Parainfluenza associated pneumonia, Respiratory syncytial virus (RSV) pneumonia, Severe Acute Respiratory Syndrome (SARS), Human papillomavirus, Herpes simplex type 2 genital ulcers, Dengue Fever, Japanese encephalitis, Tick-borne encephalitis, West-Nile virus associated disease, Yellow Fever, Epstein-Barr virus, Lassa fever, Crimean-Congo haemorrhagic fever, Ebola haemorrhagic fever, Marburg haemorrhagic fever, Rabies, Rift Valley fever, Smallpox, upper and lower respiratory infections, and poliomyelitis, optionally wherein the subject is HIV-positive.

[0036] In some embodiments, the immune disorder is selected from one or more of type 1 diabetes, vasculitis, and an immunodeficiency.

[0037] In some embodiments, the pharmaceutical composition is administered to the subject by parenteral administration. In some embodiments, the parenteral administration is intravenous administration.

[0038] Also included is the use of a pharmaceutical composition described herein in the preparation of a medicament for treating a disease in a subject, and/or for enhancing an immune response in a subject. Particular embodiments include a pharmaceutical composition described herein for use in treating a disease in a subject, and/or for enhancing an immune response in a subject.

### BRIEF DESCRIPTION OF THE DRAWINGS

[0039] FIG. 1A shows the protein topology of human interleukin 2 (IL-2) and human interleukin 2 receptor alpha chain (IL-2Rα).

[0040] FIG. 1B shows the quaternary structure of IL-2 in complex with its receptors IL-2Rα (CD25), IL-2Rβ (CD122) and the common gamma chain (CD132) (PDB: 2ERJ).

[0041] FIG. 2A illustrates fusion of the C-terminus of IL-2 to the N-terminus of IL-2Rα with a cleavable/non-cleavable linker. An optional His-tag is added at the C-terminus of IL-2Rα to facilitate purification. A schematic homodimer structure is presented. IL-2 in this fusion protein is not able to bind to and signal through IL-2Rβ/γc receptors. IL-2 activity can be recovered after protease cleavage between IL-2 and IL-2Rα.

[0042] FIG. 2B illustrates a diagram of the protein sequence motifs and configurations for proteins described in FIG. 2A.

[0043] FIG. 2C illustrates fusion of the C-terminus of Fc to the N-terminus of IL-2 with a cleavable/non-cleavable linker and fusion of the C-terminus of IL-2 to the N-terminus of IL-2Rα with a cleavable/non-cleavable linker. IL-2 in this fusion protein is not able to bind to and signal through IL-2Rβ/γc receptors. Partial activity can be restored after protease cleavage between Fc and IL-2, and full activity can be recovered after protease cleavage between IL-2 and IL-2Rα or after protease cleavage between IL-2/IL-2Rα and Fc/IL-2.

[0044] FIG. 2D illustrates a diagram of the protein sequence motifs and configurations for proteins described in FIG. 2C.

[0045] FIG. 2E illustrates fusion of the C-terminus of IL-2 to the N-terminus of IL-2Rα with a cleavable/non-cleavable linker and fusion of the C-terminus of IL-2Rα to the N-terminus of Fc with a cleavable/non-cleavable linker. IL-2 in this fusion protein is not able to bind to and signal through IL-2Rβ/γc receptors. Partial activity can be restored after protease cleavage between Fc and IL-2, and full activity can be recovered after protease cleavage between IL-2 and IL-2Rα or after protease cleavage between IL-2/IL-2Rα and Fc/IL-2Rα.

[0046] FIG. 2F illustrates a diagram of the protein sequence motifs and configurations for proteins described in FIG. 2E.

[0047] FIG. 3A illustrates fusion of the C-terminus of IL-2Rα to the N-terminus of IL-2 with a cleavable/non-cleavable linker. An optional His-tag is added at the C-terminus of IL-2Rα to facilitate purification. A predicted homodimer structure is presented. IL-2 in this fusion protein is not able to bind to and signal through IL-2Rβ/γc receptors. IL-2 activity can be recovered after protease cleavage between IL-2 and IL-2Rα.

[0048] FIG. 3B illustrates a diagram of the protein sequence motifs and configurations for proteins described in FIG. 3A.

[0049] FIG. 3C illustrates fusion of the C-terminus of Fc to the N-terminus of IL-2Rα with a cleavable/non-cleavable linker and fusion of the C-terminus of IL-2Rα to the N-terminus of IL-2 with a cleavable/non-cleavable linker. IL-2 in this fusion protein is not able to bind to and signal through IL-2Rβ/γc receptors. Partial activity can be restored after protease cleavage between Fc and IL-2, and full activity can be recovered after protease cleavage between IL-2 and IL-2Rα or after protease cleavage between IL-2/IL-2Rα and Fc/IL-2Rα.

[0050] FIG. 3D illustrates a diagram of the protein sequence motifs and configurations for proteins described in FIG. 3C.

[0051] FIG. 3E illustrates fusion of the C-terminus of IL-2Rα to the N-terminus of IL-2 with a cleavable/non-cleavable linker and fusion of the C-terminus of IL-2 to the N-terminus of Fc with a cleavable/non-cleavable linker. IL-2 in this fusion protein is not able to bind to and signal through IL-2Rβ/γc receptors. Partial activity can be restored after protease cleavage between Fc and IL-2, and full activity can be recovered after protease cleavage between IL-2 and IL-2Rα or after protease cleavage between IL-2/IL-2Rα and Fc/IL-2.

[0052] FIG. 3F illustrates a diagram of the protein sequence motifs and configurations for proteins described in FIG. 3E.

[0053] FIG. 4A shows a schematic diagram of activation of an “IL-2-linker-IL-2Rα-linker-His6” activatable proprotein through protease cleavage of the substrate linker sequences between IL-2 and IL-2Rα.

[0054] FIG. 4B shows a schematic diagram of activation of an “Fc-linker-IL-2-linker-IL-2Rα ” activatable proprotein through protease cleavage of the substrate linker sequences between IL-2 and IL-2Rα.

[0055] FIG. 4C shows a schematic diagram of activation of an “IL-2-linker-IL-2Rα-linker-Fc” activatable proprotein through protease cleavage of the substrate linker sequences between IL-2 and IL-2Rα.

[0056] FIG. 4D shows a schematic diagram of activation of an “IL-2-linker-IL-2Rα-linker-Fc” activatable proprotein through protease cleavage of the substrate linker sequences between IL-2/IL-2Rα and IL-2Rα/Fc.

[0057] FIG. 4E shows a schematic diagram of partial activation of an “IL-2-linker-IL-2Rα-linker-Fc” activatable proprotein through protease cleavage of the substrate linker sequences between IL-2Rα and Fc.

[0058] FIG. 5A illustrates fusion of the C-terminus of a binding moiety to the N-terminus of an IL-2 protein via a cleavable/non-cleavable linker, and fusion of the C-terminus of an IL-2 protein to the N-terminus of an IL-2 binding protein via a cleavable/non-cleavable linker.

[0059] FIG. 5B illustrates fusion of the C-terminus of an IL-2 protein to the N-terminus of an IL-2 binding protein via a cleavable/non-cleavable linker, and fusion of the C-terminus of an IL-2 binding protein to the N-terminus of a binding moiety via a cleavable/non-cleavable linker.

[0060] FIG. 5C illustrates fusion of the C-terminus of a binding moiety to the N-terminus of an IL-2 binding protein via a cleavable/non-cleavable linker, and fusion of the C-terminus of an IL-2 binding protein to the N-terminus of an IL-2 protein via a cleavable/non-cleavable linker.

[0061] FIG. 5D illustrates fusion of the C-terminus of an IL-2 binding protein to the N-terminus of an IL-2 protein via a cleavable/non-cleavable linker, and fusion of the C-terminus of an IL-2 protein to the N-terminus of a binding moiety via a cleavable/non-cleavable linker.

[0062] FIGS. 6A-6C show SDS-PAGE results of purified proteins and cleavage of IL-2 fusion proteins. 6A shows non-reducing SDS-PAGE results, 6B shows reducing SDS-PAGE results and 6C shows cleavage results. “M” on the figures represents the protein standard marker. On FIG. 6C, “1” represents proteins before TEV cleavage and “2” represents proteins after TEV cleavage.

[0063] FIGS. 7A-7J illustrate representative HPLC analysis results of purified proteins.

[0064] FIGS. 8A-8L and FIGS. 9A-9E illustrate the activity of IL-2 fusion proteins on M-07e proliferation as determined by a colorimetric assay (Cell Counting Kit-8 (CCK-8)).

[0065] FIGS. 10A-10C show SDS-PAGE results of purified proteins and cleavage of IL-2 fusion proteins. 10A shows non-reducing SDS-PAGE results, 10B shows reducing SDS-PAGE results and 10C shows cleavage results. “M” on the figures represents the protein standard marker. On FIG. 10C, “1” represents proteins before TEV cleavage and “2” represents proteins after TEV cleavage.

[0066] FIGS. 11A-11F illustrate representative HPLC analysis results of purified proteins.

[0067] FIGS. 12A-12F illustrate the activity of IL-2 fusion proteins on M-07e proliferation determined by a colorimetric assay (Cell Counting Kit-8 (CCK-8)).

[0068] FIGS. 13A-13C show SDS-PAGE results of purified proteins and cleavage of IL-2 fusion proteins. 13A shows non-reducing SDS-PAGE results, 13B shows reducing SDS-PAGE results and 13C shows cleavage results. “M” on the figures represents the protein standard marker. On FIG. 13C, “1” represents proteins before uPA cleavage and “2” represents proteins after uPA cleavage.

[0069] FIGS. 14A-14D illustrate representative HPLC analysis results of purified proteins.

[0070] FIGS. 15A-15E illustrate activity of IL-2 fusion proteins on M-07e proliferation determined by a colorimetric assay (Cell Counting Kit-8 (CCK-8)).

[0071] FIGS. 16A-16C show SDS-PAGE results of purified proteins and cleavage of IL-2 fusion proteins. 16A shows non-reducing SDS-PAGE results, 16B shows reducing SDS-PAGE results and 16C shows cleavage results. “M” on the figures represents the protein standard marker. On FIG. 16C, “1” represents proteins before TEV or uPA cleavage and “2” represents proteins after TEV or uPA cleavage. (P1773-P1778 cleaved by TV; P1779-P1785 cleaved by uPA.)

[0072] FIGS. 17A-17D illustrate representative HPLC analysis results of purified proteins.

[0073] FIG. 18A-18N illustrate the activity of IL-2 fusion proteins on M-07e proliferation determined by a colorimetric assay (Cell Counting Kit-8 (CCK-8)).

[0074] FIGS. 19A-19D show SDS-PAGE results of purified proteins and cleavage of IL-2 fusion proteins. 19A shows non-reducing SDS-PAGE results, 19B shows reducing SDS-PAGE results, 19C shows cleavage results with single protease and 19D shows cleavage results with double proteases. “M” on the figures represents the protein standard marker. On FIG. 19C, “1” represents proteins before protease cleavage, “2” represents proteins after uPA cleavage, “3” represents proteins after MMP-2 cleavage and “4” represents proteins after matriptase cleavage. On FIG. 19D, “1” represents proteins before protease cleavage, “2” represents proteins after uPA cleavage, “3” represents proteins after MMP-2 cleavage and “4” represents proteins after double cleavage with uPA and MMP-2.

[0075] FIGS. 20A-20D illustrate representative HPLC analysis results of purified proteins.

[0076] FIGS. 21A-21Q illustrate the activity of IL-2 fusion proteins on M-07e proliferation determined by a colorimetric assay (Cell Counting Kit-8 (CCK-8)).

[0077] FIGS. 22A-22C show SDS-PAGE results of purified proteins and cleavage of IL-2 fusion proteins. 22A shows non-reducing SDS-PAGE results, 22B shows reducing SDS-PAGE results and 22C shows cleavage results. “M” on the figures represents the protein standard marker. On FIG. 22C, “1” represents proteins before TEV cleavage and “2” represents proteins after TEV cleavage.

[0078] FIGS. 23A-23D illustrate representative HPLC analysis results of purified proteins.

[0079] FIGS. 24A-24D illustrate the activity of IL-2 fusion proteins on M-07e proliferation determined by a colorimetric assay (Cell Counting Kit-8 (CCK-8)).

[0080] FIGS. 25A-25C show SDS-PAGE results of purified proteins and cleavage of IL-2 fusion proteins. 25A shows non-reducing SDS-PAGE results, 25B shows reducing SDS-PAGE results, 25C shows cleavage results. “M” on the figures represents the protein standard marker. On FIG. 25C, “1” represents proteins before protease cleavage, “2” represents proteins after MMP-2 cleavage, “3” represents proteins after uPA cleavage and “4” represents proteins after matriptase cleavage.

[0081] FIGS. 26A-26D illustrate representative HPLC analysis results of purified proteins.

[0082] FIGS. 27A-27D show SDS-PAGE and HPLC results. binding shows non-reducing SDS-PAGE results, binding shows reducing SDS-PAGE results, binding shows cleavage results, and binding shows HPLC analysis results. “M” on the figures represents the protein standard marker. On FIG. 27C, “1” represents proteins before TEV cleavage, “2” represents proteins after TEV cleavage.

[0083] FIG. 28 illustrates the activity of IL-2 fusion proteins on M-07e proliferation determined by a colorimetric assay (Cell Counting Kit-8 (CCK-8)).

[0084] FIGS. 29A-29B show SD S-PAGE results of purified proteins. 29A shows non-reducing SD S-PAGE results and 29B shows reducing SDS-PAGE results. “M” on the figures represents the protein standard marker.

[0085] FIG. 30 shows MMP-2 cleavage results. “M” on the figures represents the protein standard marker. “1” represents proteins before MMP-2 cleavage and “2” represents proteins after MMP-2 cleavage.

[0086] FIGS. 31A-31J illustrate representative HPLC analysis results of purified proteins.

[0087] FIGS. 32A-32M illustrate the activity of IL-2 proproteins on M-07e proliferation as determined by a colorimetric assay (Cell Counting Kit-8 (CCK-8)).

### DETAILED DESCRIPTION

[0088] Unless defined otherwise, all technical and scientific terms used herein have the same meaning as commonly understood by those of ordinary skill in the art to which the disclosure belongs. Although any methods, materials, compositions, reagents, cells, similar or equivalent similar or equivalent to those described herein can be used in the practice or testing of the subject matter of the present disclosure, preferred methods and materials are described. All publications and references, including but not limited to patents and patent applications, cited in this specification are herein incorporated by reference in their entirety as if each individual publication or reference were specifically and individually indicated to be incorporated by reference herein as being fully set forth. Any patent application to which this application claims priority is also incorporated by reference herein in its entirety in the manner described above for publications and references.

[0089] Standard techniques may be used for recombinant DNA, oligonucleotide synthesis, and tissue culture and transformation (e.g., electroporation, lipofection). Enzymatic reactions and purification techniques may be performed according to manufacturer's specifications or as commonly accomplished in the art or as described herein. These and related techniques and procedures may be generally performed according to conventional methods well known in the art and as described in various general and more specific references that are cited and discussed throughout the present specification. Unless specific definitions are provided, the nomenclature utilized in connection with, and the laboratory procedures and techniques of, molecular biology, analytical chemistry, synthetic organic chemistry, and medicinal and pharmaceutical chemistry described herein are those well-known and commonly used in the art. Standard techniques may be used for recombinant technology, molecular biological, microbiological, chemical syntheses, chemical analyses, pharmaceutical preparation, formulation, and delivery, and treatment of patients.

[0090] For the purposes of the present disclosure, the following terms are defined below.

[0091] The articles “a” and “an” are used herein to refer to one or to more than one (i.e., to at least one) of the grammatical object of the article. By way of example, “an element” includes “one element”, “one or more elements” and/or “at least one element”.

[0092] By “about” is meant a quantity, level, value, number, frequency, percentage, dimension, size, amount, weight or length that varies by as much as 30, 25, 20, 15, 10, 9, 8, 7, 6, 5, 4, 3, 2 or 1% to a reference quantity, level, value, number, frequency, percentage, dimension, size, amount, weight or length.

[0093] The terms “activatable proprotein,” “activatable prodrug”, “prodrug” or “proprotein” are used interchangeably herein and refer to an activatable proprotein comprising at least a masking moiety and an active domain, or derivatives/ variants therefrom, as described herein. In one embodiment, the proprotein may also comprise one or more protein domains

[0094] The term “antigen” refers to a molecule or a portion of a molecule capable of being bound by a selective binding agent, such as an antibody, and additionally capable of being used in an animal to produce antibodies capable of binding to an epitope of that antigen. An antigen may have one or more epitopes. As used herein, the term “antigen” includes substances that are capable, under appropriate conditions, of inducing an immune response to the substance and of reacting with the products of the immune response. More broadly, the term “antigen” includes any substance to which an antibody binds, or for which antibodies are desired, regardless of whether the substance is immunogenic. For such antigens, antibodies can be identified by recombinant methods, independently of any immune response.

[0095] An “antagonist” refers to biological structure or chemical agent that interferes with or otherwise reduces the physiological action of another agent or molecule. In some instances, the antagonist specifically binds to the other agent or molecule. Included are full and partial antagonists.

[0096] An “agonist” refers to biological structure or chemical agent that increases or enhances the physiological action of another agent or molecule. In some instances, the agonist specifically binds to the other agent or molecule. Included are full and partial agonists.

[0097] As used herein, the term “amino acid” is intended to mean both naturally occurring and non-naturally occurring amino acids as well as amino acid analogs and mimetics. Naturally-occurring amino acids include the 20 (L)-amino acids utilized during protein biosynthesis as well as others such as 4-hydroxyproline, hydroxylysine, desmosine, isodesmosine, homocysteine, citrulline and ornithine, for example. Non-naturally occurring amino acids include, for example, (D)-amino acids, norleucine, norvaline, p-fluorophenylalanine, ethionine and the like, which are known to a person skilled in the art. Amino acid analogs include modified forms of naturally and non-naturally occurring amino acids. Such modifications can include, for example, substitution or replacement of chemical groups and moieties on the amino acid or by derivatization of the amino acid. Amino acid mimetics include, for example, organic structures which exhibit functionally similar properties such as charge and charge spacing characteristic of the reference amino acid. For example, an organic structure which mimics arginine (Arg or R) would have a positive charge moiety located in similar molecular space and having the same degree of mobility as the e-amino group of the side chain of the naturally occurring Arg amino acid. Mimetics also include constrained structures so as to maintain optimal spacing and charge interactions of the amino acid or of the amino acid functional groups. Those skilled in the art know or can determine what structures constitute functionally equivalent amino acid analogs and amino acid mimetics.

[0098] As used herein, a subject “at risk” of developing a disease, or adverse reaction may or may not have detectable disease, or symptoms of disease, and may or may not have displayed detectable disease or symptoms of disease prior to the treatment methods described herein. “At risk” denotes that a subject has one or more risk factors, which are measurable parameters that correlate with development of a disease, as described herein and known in the art. A subject having one or more of these risk factors has a higher probability of developing disease, or an adverse reaction than a subject without one or more of these risk factor(s).

[0099] “Biocompatible” refers to materials or compounds which are generally not injurious to biological functions of a cell or subject and which will not result in any degree of unacceptable toxicity, including allergenic and disease states.

[0100] The term “binding” refers to a direct association between two molecules, due to, for example, covalent, electrostatic, hydrophobic, and ionic and/or hydrogen-bond interactions, including interactions such as salt bridges and water bridges.

[0101] By “coding sequence” is meant any nucleic acid sequence that contributes to the code for the polypeptide product of a gene. By contrast, the term “non-coding sequence” refers to any nucleic acid sequence that does not directly contribute to the code for the polypeptide product of a gene.

[0102] Throughout this disclosure, unless the context requires otherwise, the words “comprise,” “comprises,” and “comprising” will be understood to imply the inclusion of a stated step or element or group of steps or elements but not the exclusion of any other step or element or group of steps or elements.

[0103] By “consisting of” is meant including, and limited to, whatever follows the phrase “consisting of.” Thus, the phrase “consisting of” indicates that the listed elements are required or mandatory, and that no other elements may be present. By “consisting essentially of” is meant including any elements listed after the phrase, and limited to other elements that do not interfere with or contribute to the activity or action specified in the disclosure for the listed elements. Thus, the phrase “consisting essentially of” indicates that the listed elements are required or mandatory, but that other elements are optional and may or may not be present depending upon whether or not they materially affect the activity or action of the listed elements.

[0104] The term “endotoxin free” or “substantially endotoxin free” relates generally to compositions, solvents, and/or vessels that contain at most trace amounts (e.g., amounts having no clinically adverse physiological effects to a subject) of endotoxin, and preferably undetectable amounts of endotoxin. Endotoxins are toxins associated with certain micro-organisms, such as bacteria, typically gram-negative bacteria, although endotoxins may be found in gram-positive bacteria, such as Listeria monocytogenes. The most prevalent endotoxins are lipopolysaccharides (LPS) or lipo-oligo-saccharides (LOS) found in the outer membrane of various Gram-negative bacteria, and which represent a central pathogenic feature in the ability of these bacteria to cause disease. Small amounts of endotoxin in humans may produce fever, a lowering of the blood pressure, and activation of inflammation and coagulation, among other adverse physiological effects.

[0105] Therefore, in pharmaceutical production, it is often desirable to remove most or all traces of endotoxin from drug products and/or drug containers, because even small amounts may cause adverse effects in humans. A depyrogenation oven may be used for this purpose, as temperatures in excess of 300° C. are typically required to break down most endotoxins. For instance, based on primary packaging material such as syringes or vials, the combination of a glass temperature of 250° C. and a holding time of 30 minutes is often sufficient to achieve a 3 log reduction in endotoxin levels. Other methods of removing endotoxins are contemplated, including, for example, chromatography and filtration methods, as described herein and known in the art.

[0106] Endotoxins can be detected using routine techniques known in the art. For example, the Limulus Amoebocyte Lysate assay, which utilizes blood from the horseshoe crab, is a very sensitive assay for detecting presence of endotoxin. In this test, very low levels of LPS can cause detectable coagulation of the limulus lysate due a powerful enzymatic cascade that amplifies this reaction. Endotoxins can also be quantitated by enzyme-linked immunosorbent assay (ELISA). To be substantially endotoxin free, endotoxin levels may be less than about 0.001, 0.005, 0.01, 0.02, 0.03, 0.04, 0.05, 0.06, 0.08, 0.09, 0.1, 0.5, 1.0, 1.5, 2, 2.5, 3, 4, 5, 6, 7, 8, 9, or 10 EU/mg of active compound. Typically, 1 ng lipopolysaccharide (LPS) corresponds to about 1-10 EU.

[0107] The term “half maximal effective concentration” or “EC₅₀” refers to the concentration of an agent (e.g., activatable proprotein) as described herein at which it induces a response halfway between the baseline and maximum after some specified exposure time; the EC₅₀ of a graded dose response curve therefore represents the concentration of a compound at which 50% of its maximal effect is observed. EC50 also represents the plasma concentration required for obtaining 50% of a maximum effect in vivo Similarly, the “EC₉₀” refers to the concentration of an agent or composition at which 90% of its maximal effect is observed. The “EC₉₀” can be calculated from the “EC50” and the Hill slope, or it can be determined from the data directly, using routine knowledge in the art. In some embodiments, the EC₅₀ of an agent (e.g., activatable proprotein) is less than about 0.01, 0.05, 0.1, 0.2, 0.3, 0.4, 0.5, 0.6, 0.7, 0.8, 0.9, 1, 2, 3, 4, 5, 6, 7, 8, 9, 10, 11, 12, 13, 14, 15, 16, 17, 18, 19, 20, 25, 30, 40, 50, 60, 70, 80, 90, 100, 200 or 500 nM. In some embodiments, an agent will have an EC₅₀ value of about 1 nM or less.

[0108] “Immune response” means any immunological response originating from immune system, including responses from the cellular and humeral, innate and adaptive immune systems. Exemplary cellular immune cells include for example, lymphocytes, macrophages, T cells, B cells, NK cells, neutrophils, eosinophils, dendritic cells, mast cells, monocytes, and all subsets thereof. Cellular responses include for example, effector function, cytokine release, phagocytosis, efferocytosis, translocation, trafficking, proliferation, differentiation, activation, repression, cell-cell interactions, apoptosis, etc. Humeral responses include for example IgG, IgM, IgA, IgE, responses and their corresponding effector functions.

[0109] The “half-life” of an agent such as an activatable proprotein can refer to the time it takes for the agent to lose half of its pharmacologic, physiologic, or other activity, relative to such activity at the time of administration into the serum or tissue of an organism, or relative to any other defined time-point. “Half-life” can also refer to the time it takes for the amount or concentration of an agent to be reduced by half of a starting amount administered into the serum or tissue of an organism, relative to such amount or concentration at the time of administration into the serum or tissue of an organism, or relative to any other defined time-point. The half-life can be measured in serum and/or any one or more selected tissues.

[0110] The terms “modulating” and “altering” include “increasing,” “enhancing” or “stimulating,” as well as “decreasing” or “reducing,” typically in a statistically significant or a physiologically significant amount or degree relative to a control. An “increased,” “stimulated” or “enhanced” amount is typically a “statistically significant” amount, and may include an increase that is 1.1, 1.2, 1.5, 2, 3, 4, 5, 6, 7, 8, 9, 10, 15, 20, 30, 40, 50, 60, 70, 80, 90, 100 or more times (e.g., 500, 1000 times) (including all integers and ranges in between e.g., 1.5, 1.6, 1.7. 1.8, etc.) the amount produced by no composition (e.g., the absence of agent) or a control composition. A “decreased” or “reduced” amount is typically a “statistically significant” amount, and may include a 1%, 2%, 3%, 4%, 5%, 6%, 7%, 8%, 9%, 10%, 11%, 12%, 13%, 14%, 15%, 16%, 17%, 18% , 19%, 20%, 25%, 30%, 35%, 40%, 45%, 50%, 55%, 60%, 65%, 70%, 75%, 80%, 85%, 90%, 95%, or 100% decrease (including all integers and ranges in between) in the amount produced by no composition (e.g., the absence of an agent) or a control composition. Examples of comparisons and “statistically significant” amounts are described herein.

[0111] The terms “polypeptide,” “protein” and “peptide” are used interchangeably and mean a polymer of amino acids not limited to any particular length. The term “enzyme” includes polypeptide or protein catalysts. The terms include modifications such as myristoylation, sulfation, glycosylation, phosphorylation and addition or deletion of signal sequences. The terms “polypeptide” or “protein” means one or more chains of amino acids, wherein each chain comprises amino acids covalently linked by peptide bonds, and wherein said polypeptide or protein can comprise a plurality of chains non-covalently and/or covalently linked together by peptide bonds, having the sequence of native proteins, that is, proteins produced by naturally-occurring and specifically non-recombinant cells, or genetically-engineered or recombinant cells, and comprise molecules having the amino acid sequence of the native protein, or molecules having deletions from, additions to, and/or substitutions of one or more amino acids of the native sequence. In certain embodiments, the polypeptide is a “recombinant” polypeptide, produced by recombinant cell that comprises one or more recombinant DNA molecules, which are typically made of heterologous polynucleotide sequences or combinations of polynucleotide sequences that would not otherwise be found in the cell.

[0112] The term “polynucleotide” and “nucleic acid” includes mRNA, RNA, cRNA, cDNA, and DNA. The term typically refers to polymeric form of nucleotides of at least 10 bases in length, either ribonucleotides or deoxynucleotides or a modified form of either type of nucleotide. The term includes single and double stranded forms of DNA. The terms “isolated DNA” and “isolated polynucleotide” and “isolated nucleic acid” refer to a molecule that has been isolated free of total genomic DNA of a particular species. Therefore, an isolated DNA segment encoding a polypeptide refers to a DNA segment that contains one or more coding sequences yet is substantially isolated away from, or purified free from, total genomic DNA of the species from which the DNA segment is obtained. Also included are non-coding polynucleotides (e.g., primers, probes, oligonucleotides), which do not encode a polypeptide. Also included are recombinant vectors, including, for example, expression vectors, viral vectors, plasmids, cosmids, phagemids, phage, viruses, and the like.

[0113] Additional coding or non-coding sequences may, but need not, be present within a polynucleotide described herein, and a polynucleotide may, but need not, be linked to other molecules and/or support materials. Hence, a polynucleotide or expressible polynucleotides, regardless of the length of the coding sequence itself, may be combined with other sequences, for example, expression control sequences.

[0114] The term “isolated” polypeptide or protein referred to herein means that a subject protein (1) is free of at least some other proteins with which it would typically be found in nature, (2) is essentially free of other proteins from the same source, e.g., from the same species, (3) is expressed by a cell from a different species, (4) has been separated from at least about 50 percent of polynucleotides, lipids, carbohydrates, or other materials with which it is associated in nature, (5) is not associated (by covalent or non-covalent interaction) with portions of a protein with which the “isolated protein” is associated in nature, (6) is operably associated (by covalent or non-covalent interaction) with a polypeptide with which it is not associated in nature, or (7) does not occur in nature. Such an isolated protein can be encoded by genomic DNA, cDNA, mRNA or other RNA, of may be of synthetic origin, or any combination thereof. In certain embodiments, the isolated protein is substantially free from proteins or polypeptides or other contaminants that are found in its natural environment that would interfere with its use (therapeutic, diagnostic, prophylactic, research or otherwise).

[0115] In certain embodiments, the “purity” of any given agent (e.g., activatable proprotein) in a composition may be defined. For instance, certain compositions may comprise an agent such as a polypeptide agent that is at least 80%, 85%, 90%, 91%, 92%, 93%, 94%, 95%, 96%, 97%, 98%, 99%, or 100% pure on a protein basis or a weight-weight basis, including all decimals and ranges in between, as measured, for example and by no means limiting, by high performance liquid chromatography (HPLC), a well-known form of column chromatography used frequently in biochemistry and analytical chemistry to separate, identify, and quantify compounds.

[0116] The term “reference sequence” refers generally to a nucleic acid coding sequence, or amino acid sequence, to which another sequence is being compared. All polypeptide and polynucleotide sequences described herein are included as references sequences, including those described by name and those described in the Tables and the Sequence Listing.

[0117] Certain embodiments include biologically active “variants” and “fragments” of the proteins/polypeptides described herein, and the polynucleotides that encode the same. “Variants” contain one or more substitutions, additions, deletions, and/or insertions relative to a reference polypeptide or polynucleotide (see, e.g., the Tables and the Sequence Listing). A variant polypeptide or polynucleotide comprises an amino acid or nucleotide sequence with at least about 50%, 55%, 60%, 65%, 70%, 75%, 80%, 85%, 90%, 91%, 92%, 93%, 94%, 95%, 96%, 97%, 98% , 99% or more sequence identity or similarity or homology to a reference sequence, as described herein, and substantially retains the activity of that reference sequence. Also included are sequences that consist of or differ from a reference sequences by the addition, deletion, insertion, or substitution of 1, 2, 3, 4, 5, 6, 7, 8, 9, 10, 11, 12, 13, 14, 15, 16, 17, 18, 19, 20, 30, 40, 50, 60,70, 80, 90, 100, 110, 120, 130, 140, 150 or more amino acids or nucleotides and which substantially retain at least one activity of that reference sequence. In certain embodiments, the additions or deletions include C-terminal and/or N-terminal additions and/or deletions.

[0118] The terms “sequence identity” or, for example, comprising a “sequence 50% identical to,” as used herein, refer to the extent that sequences are identical on a nucleotide-by-nucleotide basis or an amino acid-by-amino acid basis over a window of comparison. Thus, a “percentage of sequence identity” may be calculated by comparing two optimally aligned sequences over the window of comparison, determining the number of positions at which the identical nucleic acid base (e.g., A, T, C, G, I) or the identical amino acid residue (e.g., Ala, Pro, Ser, Thr, Gly, Val, Leu, Ile, Phe, Tyr, Trp, Lys, Arg, His, Asp, Glu, Asn, Gln, Cys and Met) occurs in both sequences to yield the number of matched positions, dividing the number of matched positions by the total number of positions in the window of comparison (i.e., the window size), and multiplying the result by 100 to yield the percentage of sequence identity. Optimal alignment of sequences for aligning a comparison window may be conducted by computerized implementations of algorithms (GAP, BESTFIT, FASTA, and TFASTA in the Wisconsin Genetics Software Package Release 7.0, Genetics Computer Group, 575 Science Drive Madison, Wis., USA) or by inspection and the best alignment (i.e., resulting in the highest percentage homology over the comparison window) generated by any of the various methods selected. Reference also may be made to the BLAST family of programs as for example disclosed by Altschul et al., Nucl. Acids Res. 25:3389, 1997.

[0119] The term “solubility” refers to the property of an agent (e.g., activatable proprotein) provided herein to dissolve in a liquid solvent and form a homogeneous solution. Solubility is typically expressed as a concentration, either by mass of solute per unit volume of solvent (g of solute per kg of solvent, g per dL (100 mL), mg/ml, etc.), molarity, molality, mole fraction or other similar descriptions of concentration. The maximum equilibrium amount of solute that can dissolve per amount of solvent is the solubility of that solute in that solvent under the specified conditions, including temperature, pressure, pH, and the nature of the solvent. In certain embodiments, solubility is measured at physiological pH, or other pH, for example, at pH 5.0, pH 6.0, pH 7.0, pH 7.4, pH 7.6, pH 7.8, or pH 8.0 (e.g., about pH 5-8). In certain embodiments, solubility is measured in water or a physiological buffer such as PBS or NaCl (with or without NaPO₄). In specific embodiments, solubility is measured at relatively lower pH (e.g., pH 6.0) and relatively higher salt (e.g., 500 mM NaCl and 10 mM NaPO₄). In certain embodiments, solubility is measured in a biological fluid (solvent) such as blood or serum. In certain embodiments, the temperature can be about room temperature (e.g., about 20, 21, 22, 23, 24, 25° C.) or about body temperature (37° C.). In certain embodiments, an agent has a solubility of at least about 0.1, 0.2, 0.3, 0.4, 0.5, 0.6, 0.7, 0.8, 0.9, 1, 2, 3, 4, 5, 6, 7, 8, 9, 10, 11, 12, 13, 14, 15, 16, 17, 18, 19, 20, 25, 30, 40, 50, 60, 70, 80, 90 or 100 mg/ml at room temperature or at 37° C.

[0120] A “subject” or a “subject in need thereof” or a “patient” or a “patient in need thereof” includes a mammalian subject such as a human subject.

[0121] “Substantially” or “essentially” means nearly totally or completely, for instance, 95%, 96%, 97%, 98%, 99% or greater of some given quantity.

[0122] By “statistically significant,” it is meant that the result was unlikely to have occurred by chance. Statistical significance can be determined by any method known in the art. Commonly used measures of significance include the p-value, which is the frequency or probability with which the observed event would occur, if the null hypothesis were true. If the obtained p-value is smaller than the significance level, then the null hypothesis is rejected. In simple cases, the significance level is defined at a p-value of 0.05 or less.

[0123] “Therapeutic response” refers to improvement of symptoms (whether or not sustained) based on administration of one or more therapeutic agents.

[0124] As used herein, the terms “therapeutically effective amount”, “therapeutic dose,” “prophylactically effective amount,” or “diagnostically effective amount” is the amount of an agent (e.g., activatable proprotein, activated protein) needed to elicit the desired biological response following administration.

[0125] As used herein, “treatment” of a subject (e.g., a mammal, such as a human) or a cell is any type of intervention used in an attempt to alter the natural course of the individual or cell. Treatment includes, but is not limited to, administration of a pharmaceutical composition, and may be performed either prophylactically or subsequent to the initiation of a pathologic event or contact with an etiologic agent. Also included are “prophylactic” treatments, which can be directed to reducing the rate of progression of the disease or condition being treated, delaying the onset of that disease or condition, or reducing the severity of its onset. “Treatment” or “prophylaxis” does not necessarily indicate complete eradication, cure, or prevention of the disease or condition, or associated symptoms thereof.

[0126] The term “wild-type” refers to a gene or gene product (e.g., a polypeptide) that is most frequently observed in a population and is thus arbitrarily designed the “normal” or “wild-type” form of the gene.

[0127] Each embodiment in this specification is to be applied to every other embodiment unless expressly stated otherwise.

### Activatable Proproteins

[0128] Embodiments of the present disclosure relate to activatable proprotein homodimers, or prodrugs, comprising two IL-2 proteins that remains relatively inactive in the proprotein form, and which can be activated upon contact with the appropriate environment. The activatable proproteins described herein comprise at least two separate but otherwise identical (or substantially identical) polypeptide chains, which bind together via non-covalent interactions and/or certain covalent bonds, for example, disulfide bonds, but not via peptide or amide bonds. Generally, each polypeptide chain comprises an IL-2 protein, an IL-2 binding protein such as an IL-2Rα protein, and a cleavable linker. Here, the IL-2 protein of the first polypeptide binds to the IL-2 binding protein of the second polypeptide, and the IL-2 protein of the second polypeptide binds to the IL-2 binding protein of the first polypeptide, to form a relatively stable homodimer in which these binding interactions block or sterically hinder the IL-2 proteins in each chain from interacting with or binding to their cognate receptor(s) on a cell (see, for example, FIGS. 2A and 2C). In some instances, each polypeptide chain comprises a purification tag at the N- or C-terminus, which is separated from the rest of the polypeptide by a linker (see, for example, FIG. 2B and FIG. 3B). In some instances, each polypeptide chain comprises a binding domain (for example, an Fc domain or a fragment thereof) at the N- or C-terminus, which is separated from the rest of the polypeptide by a linker (see, for example, FIGS. 5A-5D), and which binds to the binding domain on the other polypeptide chain to further stabilize the proprotein homodimer (see, for example, FIGS. 2C, 2E, 3C, and 3D). As noted above, at least one of the linkers is a cleavable linker, which upon cleavage in a target cell or tissue restores IL-2 activity by opening the homodimer and exposing at least one active or binding site of the IL-2 proteins. Such allows the IL-2 portions of the now activated protein(s) to interact with or bind to certain of their cognate receptor(s), for example, IL-2Rβ/γc and/or IL-2Rα/β/γc receptor chains on an immune cell, and thereby effect downstream immune cell-signaling pathways.

[0129] The activatable proproteins described herein address many of the drawbacks of standard IL-2 therapies in the treatment of cancer, infectious diseases, and other diseases, including high initial serum Cₘₐₓ, which causes over-activation of the immune system, preferential activation of regulatory T cells expressing IL-2Rα/β/γc receptor chains relative to immune cells expressing IL-2Rβ/γc receptor chains, short PK because of the otherwise small molecular size of IL-2 and/or catabolism by the large number of immune cells that express IL-2 receptors, poor accumulation in the target tissues (e.g., cancers, tumors) because of the short PK and/or ineffective tumor targeting, and undesirable accumulation and immune activation in normal tissues.

[0130] Embodiments of the present disclosure thus include an activatable proprotein homodimer (complex), comprising a first polypeptide (chain) and a second polypeptide (chain),

[0131] wherein the first polypeptide and the second polypeptide comprise, in an N- to C-terminal orientation, or a C- to N-terminal orientation, a binding moiety, a first linker, an IL-2 protein, a second linker, and an IL-2 binding protein;

[0132] or wherein the first polypeptide and the second polypeptide comprise, in an N- to C-terminal orientation, or a C- to N-terminal orientation, a binding moiety, a first linker, an IL-2 binding protein, a second linker, and an IL-2 protein,

[0133] wherein the binding moiety of the first polypeptide binds to the binding moiety of the second polypeptide, wherein the IL-2 protein of the first polypeptide binds to the IL-2 binding protein of the second polypeptide, and wherein the IL-2 binding protein of the first polypeptide binds to the IL-2 protein of the second polypeptide, wherein said (collective) binding masks a binding site of IL-2 protein(s) that otherwise binds to an IL-2Rβ/γc and/or IL-2Rα/β/γc chain present on the surface of an immune cell in vitro or in vivo, and wherein at least one of the first or the second linker is a cleavable linker.

[0134] Also included is an activatable proprotein homodimer (complex), comprising a first polypeptide (chain) and a second polypeptide (chain),

[0135] wherein the first and the second polypeptide comprise, in an N- to C-terminal orientation, or a C- to N-terminal orientation, an IL-2 protein, a first linker, an IL-2 binding protein, a second linker, and optionally an affinity purification tag;

[0136] or wherein the first and the second polypeptide comprise, in an N- to C-terminal orientation, or a C- to N-terminal orientation, an IL-2 binding protein, a first linker, an IL-2 protein, a second linker, and optionally an affinity purification tag,

[0137] wherein the IL-2 protein of the first polypeptide binds to the IL-2 binding protein of the second polypeptide, and wherein the IL-2 binding protein of the first polypeptide binds to the IL-2 protein of the second polypeptide, wherein said (collective) binding masks a binding site of IL-2 protein(s) that otherwise binds to an IL-2Rβ/γc and/or IL-2Rα/β/γc chain present on the surface of an immune cell in vitro or in vivo, and wherein the first linker is a cleavable linker.

[0138] As noted above, the IL-2 protein(s) and the IL-2 binding protein(s) interact or bind together, for example, via non-covalent interactions or certain covalent bonds (e.g., disulfide bonds). In some instances, the binding of the IL-2 protein(s) to the IL-2 binding protein(s), for example, IL-2Rα protein(s), sterically blocks or hinders binding of the IL-2 protein(s) to their cognate IL-2Rα/β/γc receptor chains expressed on regulatory T-cells (T_{regs}). In some instances, that binding and steric hindrance is preserved in the activated form of the protein, and can provide the advantage of minimizing the activation of immunosuppressive T_{regs}, and reducing the consumption of the proprotein and the active protein alike. Exemplary IL-2 proteins and IL-2 binding proteins are described elsewhere herein.

[0139] In some instances, the binding moieties of the first and second polypeptides dimerize together via at least one non-covalent interaction, at least one covalent bond (for example, at least one disulfide bond), or any combination of non-covalent interactions and covalent bonds, to further stabilize the activatable proprotein and/or to further mask the binding of the IL-2 proteins to their cognate receptors, for example, IL-2Rα/β/γc and/or IL-2Rβ/γc receptor chains. Typically, however, binding moieties of the first and second polypeptide do not bind together or dimerize via a peptide or amide bond. In some embodiments, the binding moieties bind together as a heterodimer, that is, a heterodimer composed of two different binding moieties. In some embodiments, the binding moieties bind together as a homodimer, that is, a homodimer composed of two identical or nearly identical binding moieties. Thus, the binding moieties of the first and second polypeptides can be the same (or substantially the same) or different. In most instances, the binding moieties of the first and second polypeptides are the same, and do not bind to the IL-2 protein, or the IL-2 binding protein. However, in some instances, one or both of the binding moieties can bind to the IL-2 protein and/or the IL-2 binding protein. Exemplary binding moieties are described herein.

[0140] As noted above, at least one of the linkers comprises a cleavable linker, for example, a linker cleavable by a protease. In some instances, one linker comprises a cleavable linker and the other linker is a stable (e.g., physiologically stable) linker. In some instances, both linkers comprise cleavable linkers. In some instances, the protease is expressed in target tissues or cells, for example, cancer tissues or cancer cells. Cleavage of the linker in that context releases a masking moiety, removes the steric hindrance of the IL-2 protein, and allows selective activation of the IL-2 protein in diseased tissues or cells, relative to normal or healthy tissues or cells. Such selective and localized activation not only reduces needless consumption of administered IL-2, thereby increasing its half-life, but also enhances tissue penetration and reduces undesirable systemic effects of IL-2, among other advantages. Exemplary linkers are described herein.

[0141] In some embodiments, the homodimeric binding between the first and second polypeptides allosterically inhibits the binding of the IL-2 proteins to their target, for example, cognate IL-2Rβ/γc and/or IL-2Rα/β/γc receptor chains on the surface of an immune cell. In these and related embodiments, the activatable proprotein shows no binding or substantially no binding to its target, or no more than 0.001%, 0.01%, 0.1%, 1%, 2%, 3%, 4%, 5%, 6%, 7%, 8%, 9%, 10%, 15%, 20%, 25%, 30%, 35%, 40%, or 50% binding to its target, as compared to the binding of the active domain or the IL-2 protein alone, optionally for at least 2, 4, 6, 8, 12, 28, 24, 30, 36, 48, 60, 72, 84, 96 hours, or 5, 10, 15, 30, 45, 60, 90, 120, 150, 180 days, or 1, 2, 3, 4, 5, 6, 7, 8, 9, 10, 11, 12 months or greater, optionally as measured in vivo or in a Target Displacement in vitro assay available in the art.

[0142] The various components of each polypeptide chain can be fused in any orientation. For example, in some embodiments, the first polypeptide and the second polypeptide of comprise, in an N- to C-terminal orientation, the binding moiety, the first linker, the IL-2 protein, the second linker, and the IL-2 binding protein. In some embodiments, the first polypeptide and the second polypeptide of comprise, in an N- to C-terminal orientation, the IL-2 binding protein, the first linker, the IL-2 protein, the second linker, and the binding moiety. In certain embodiments, the first polypeptide and the second polypeptide comprise, in an N- to C-terminal orientation, the binding moiety, the first linker, the IL-2 binding protein, the second linker, and the IL-2 protein. In some embodiments, the first polypeptide and the second polypeptide comprise, in an N- to C-terminal orientation, the IL-2 protein, the first linker, the IL-2 binding protein, the second linker, and the binding moiety. In particular embodiments, the first polypeptide and the second polypeptide comprise, in an N- to C-terminal orientation, the IL-2 protein, the first linker, the IL-2 binding protein, the second linker, and the affinity purification tag. In some embodiments, the first polypeptide and the second polypeptide of (d) comprise, in an N- to C-terminal orientation, the IL-2 binding protein, the first linker, the IL-2 protein, the second linker, and the affinity purification tag. Other possible orientations will be apparent to persons skilled in the art.

[0143] Certain activatable proproteins are composed only of two of the foregoing protein chains, that is, they are composed only of a first polypeptide and a second polypeptide, as described herein. In some instances, however, certain activatable proproteins comprise multiple chains, for example, where the first and second polypeptide chains form a “core structure” upon which additional or higher-order structures can be built, the various core structures being optionally bound together via additional protein binding domains.

[0144] The individual components of the activatable proproteins are described in greater detail herein.

[0145] IL-2 Proteins. The activatable proproteins described herein comprise at least one “IL-2 protein” (or Interleukin-2 protein), including human IL-2 proteins. IL-2 is a cytokine signals through the IL-2 receptor (IL-2R), a complex composed of up to three chains, termed the α (CD25), β (CD122) and γc (CD132) chains. 1L-2 is produced by T-cells in response to antigenic or mitogenic stimulation, and is required for T-cell proliferation and other activities crucial to regulation of the immune response. IL-2 can stimulate B-cells, monocytes, lymphokine-activated killer cells, natural killer cells, and glioma cells, among other immune cells.

[0146] IL-2 is a 15-16 kDA protein composed of a signal peptide (residues 1-20) and an active mature protein (residues 21-153). Exemplary human IL-2 amino acid sequences are provided in Table S1 below.

TABLE S1
Exemplary IL-2 Peptides

| | | SEQ ID |
|---|---|---|
| Name | Sequence | NO: |
| Human IL-2 | MYRMQLLSCIALSLALVTNSAPTSSSTKKTQLQLEHLLLDLQMILNGINNYK | 1 |
| FL | NPKLTRMLTFKFYMPKKATELKHLQCLEEELKPLEEVLNLAQSKNFHLRPRD | |
| Precursor | LISNINVIVLELKGSETTFMCEYADETATIVEFLNRWITFCQSIISTLT | |
| Human IL-2 | APTSSSTKKTQLQLEHLLLDLQMILNGINNYKNPKLTRMLTFKFYMPKKATE | 2 |
| mature | LKHLQCLEEELKPLEEVLNLAQSKNFHLRPRDLISNINVIVLELKGSETTFM | |
| form C125S | CEYADETATIVEFLNRWITFSQSIISTLT | |
| Human IL-2 | APTSSSTKKTQLQLEHLLLDLQMILNGINNYKNPKLTRMLTFKFYMPKKATE | 3 |
| mature | LKHLQCLEEELKPLEEVLNLAHSKNFHFDPRDVVSNINVFVLELKGSETTFM | |
| form (D10) | CEYADETATIVEFLNRWITFCQSIISTLT | |
| Q74H, L80F, | | |
| R81D, L85V, | | |
| I86V, and | | |
| I92F | | |
| Human IL-2 | APTSSSTKKTQLQLEHLLLDLQMILNGINNYKNPKLTRMLTFKFYMPKKATE | 7 |
| mature | LKHLQCLEEELKPLEEALNLAPSKNFHLRPRDLISNINVIVLELKGSETTFM | |
| form with | CEYADETATIVEFLNRWITFCQSTISTLT | |
| V69A, Q74P | | |
| and I128T | | |
| Human IL-2 | APTSSSTKKTQLQLEHLLLDLQMILNGINNYKNPKLTRMLTAKFAMPKKATE | 8 |
| mature | LKHLQCLEEELKPLEEVLNGAQSKNFHLRPRDLISNINVIVLELKGSETTFM | |
| form with | CEYADETATIVEFLNRWITFCQSIISTLT | |
| F42A, Y45A | | |
| and L72G | | |
| Human IL-2 | APTSSSTKKTQLQLEHLLLDLQMILNGINNYKNPKLTKMLTQKFNMPKKATE | 9 |
| mature | LKHLQCLEELLKPLEVVLNLAQSKNFHLRPRDLISNINVIVLELKGSETTFM | |
| form with | CEYADETATIVEFLNRWITFCQSIISTLT | |
| R38K, | | |
| F42Q, | | |
| Y45N, E62L | | |
| and E68V | | |
| Human IL-2 | APTSSSTKKTQLQLEHLLLDLQMILNGINNYKNPKLTKMLTQKFEMPKKATE | 10 |
| mature | LKHLQCLEEELKPLEVVLNLAQSKNFHLRPRDLISNINVIVLELKGSETTFM | |
| form with | CEYADETATIVEFLNRWITFCQSIISTLT | |
| R38K, | | |
| F42Q, Y45E | | |
| and E68V | | |
| Human IL-2 | APTSSSTKKTQLQLEHLLLDLQMILNGINNYKNPKLTAMLTIKFNMPKKATE | 11 |
| mature | LKHLQCLEELLKPLEVVLNLAQSKNFHLRPRDLISNINVIVLELKGSETTFM | |
| form with | CEYADETATIVEFLNRWITFCQSIISTLT | |
| R38A, | | |
| F42I, | | |
| Y45N, E62L | | |
| and E68V | | |
| Human IL-2 | APTSSSTKKTQLQLEHLLLDLQMILNGINNYKNPKLTKMLTKKFRMPKKATE | 12 |
| mature | LKHLQCLEELLKPLEVVLNLAQSKNFHLRPRDLISNINVIVLELKGSETTFM | |
| form with | CEYADETATIVEFLNRWITFCQSIISTLT | |
| R38K, | | |
| F42K, | | |
| Y45R, E62L | | |
| and E68V | | |
| Human IL-2 | APTSSSTKKTQLQLEHLLLDLQMILNGINNYKNPKLTKMLTIKFEMPKKATE | 13 |
| mature | LKHLQCLEEELKPLEVVLNLAQSKNFHLRPRDLISNINVIVLELKGSETTFM | |
| form with | CEYADETATIVEFLNRWITFCQSIISTLT | |
| R38K, | | |
| F42I, Y45E | | |
| and E68V | | |
| Human IL-2 | APTSSSTKKTQLQLEHLLLDLQMILNGINNYKNPKLTAMLTAKFAMPKKATE | 14 |
| mature | LKHLQCLEEALKPLEEVLNLAQSKNFHLRPRDLISNINVIVLELKGSETTFM | |
| form with | CEYADETATIVEFLNRWITFCQSIISTLT | |
| R38A, | | |
| F42A, Y45A | | |
| and E62A | | |
| Human IL-2 | APASSSTKKTQLQLEHLLLDLQMILNGINNYKNPKLTRMLTFKFYMPKKATE | 15 |
| mature | LKHLQCLEEELKPLEEVLNLAQSKNFHLRPRDLISNINVIVLELKGSETTFM | |
| form with | CEYADETATIVEFLNRWITFCQSIISTLT | |
| T3A | | |
| Human IL-2 | APTSSSTKKTQLQLEHLLLDLQMILNGINNYKNPKLTRMLTAKFYMPKKATE | 16 |
| mature | LKHLQCLEEELKPLEEVLNLAQSKNFHLRPRDLISNINVIVLELKGSETTFM | |
| form with | CEYADETATIVEFLNRWITFCQSIISTLT | |
| F42A | | |
| Human IL-2 | APTSSSTKKTQLQLEHLLLDLQMILNGINNYKNPKLTRMLTFKFAMPKKATE | 17 |
| mature | LKHLQCLEEELKPLEEVLNLAQSKNFHLRPRDLISNINVIVLELKGSETTFM | |
| form with | CEYADETATIVEFLNRWITFCQSIISTLT | |
| Y45A | | |
| Human IL-2 | APTSSSTKKTQLQLEHLLLDLQMILNGINNYKNPKLTRMLTAKFAMPKKATE | 18 |
| mature | LKHLQCLEEELKPLEEVLNLAQSKNFHLRPRDLISNINVIVLELKGSETTFM | |
| form with | CEYADETATIVEFLNRWITFCQSIISTLT | |
| F42A and | | |
| Y45A | | |
| Human IL-2 | APTSSSTKKTQLQLEHLLLDLQMILNGINNYKNPKLTRMLTFKFYMPKKATE | 19 |
| mature | LKHLQCLESELKPLEEVLNLAQSKNFHLRPRDLISNINVIVLELKGSETTFM | |
| form with | CEYADETATIVEFLNRWITFCQSIISTLT | |
| E61S | | |

[0147] Thus, in certain embodiments, an IL-2 protein comprises, consists, or consists essentially of an amino acid sequence selected from Table S1, or an active variant or fragment thereof that is at least 80, 85, 90, 95, 98, or 100% identical to a sequence selected from Table S1. In some embodiments, an “active” IL-2 protein or fragment or variant is characterized, for example, by its ability to bind to an IL-2Rβ/γc and/or IL-2Rα/β/γc receptor chain present on the surface of an immune cell in vitro or in vivo, and stimulate downstream signaling activities, absent steric hindrance by the masking moieties described herein. Examples of downstream signaling activities include IL-2 mediated signaling via one or more of the JAK-STAT, PI3K/Akt/mTOR, and MAPK/ERK pathways, including combinations thereof. Altogether, IL-2 signaling stimulates an array of downstream pathways leading to responses that have a significant role in the development, function, and survival of CD4 T cells, CD8 T cells, NK cells, NKT cells, macrophages, and intestinal intraepithelial lymphocytes, among others.

[0148] In particular embodiments, the IL-2 protein is a mature form of IL-2, or an active variant or fragment thereof, which comprises, consists, or consists essentially of an amino acid sequence that is at least 80, 85, 90, 95, 98, or 100% identical to amino acids 21-153 of SEQ ID NO: 1. In some embodiments, the IL-2 protein comprises a C145X substitution, as defined by SEQ ID NO: 1, wherein X is any amino acid. In specific embodiments, the IL-2 protein comprises a C145S substitution as defined by SEQ ID NO: 1.

[0149] Certain IL-2 proteins comprise, consist, or consist essentially of an amino acid sequence that is at least 80, 85, 90, 95, 98, or 100% identical to SEQ ID NO: 2 (mature human IL-2 with C125S substitution). In some embodiments, an active variant or fragment of SEQ ID NO: 2 retains the S125 residue as defined therein.

[0150] Certain IL-2 proteins comprise one or more defined amino acid substitutions relative to the exemplary amino acid sequences in Table S1. For example, some IL-2 proteins comprise one or more amino acid substitutions selected from K35C, R38C, T41C, F42C, E61C, and V69C as defined by SEQ ID NO: 2. In some embodiments, the IL-2 protein forms a disulfide bond with the IL-2 binding protein (e.g., IL-2Rα) via one or more of the cysteine substitutions selected from K35C, R38C, T41C, F42C, E61C, and V69C. Certain IL-2 proteins comprise one or more amino acid substitutions at position 69, 74, and/or 128 as defined by SEQ ID NO: 2, including combinations thereof and including, for example, wherein the one or more amino acid substitutions are selected from V69A, Q74P, and I128T as defined by SEQ ID NO: 2. Some IL-2 proteins comprise one or more amino acid substitutions at position R38, F42, Y45, E62, E68, and/or L72 as defined by SEQ ID NO: 2, including combinations thereof and including, for example, wherein the one or more amino acid substitutions are selected from R38A and R38K; F42A, F42G, F42S, F42T, F42Q, F42E, F42N, F42D, F42R, F42K, and F42I; Y45A, Y45G, Y45S, Y45T, Y45Q, Y45E, Y45N, Y45D, Y45R, and Y45K; E62A and E62L; E68A and E68V; and L72A, L72G, L72S, L72T, L72Q, L72E, L72N, L72D, L72R, and L72K, including combinations thereof. Specific examples include where the IL-2 protein comprises one or a combination of amino acid substitutions selected from F42A, Y45A, and L72G; R38K, F42Q, Y45N, E62L, and E68V; R38K, F42Q, Y45E, and E68V; R38A, F42I, Y45N, E62L, and E68V; R38K, F42K, Y45R, E62L, and E68V; R38K, F42I, Y45E, and E68V; and R38A, F42A, Y45A, and E62A. Some IL-2 proteins comprise one or a combination of amino acid substitutions at T3 and/or E61 as defined by SEQ ID NO: 2, for example, T3A and/or E61S. Thus, an IL-2 protein can comprise any one or more of the foregoing amino acid substitutions, including combinations thereof.

[0151] It will be appreciated that any one or more of the foregoing IL-2 proteins can be combined with any of the other components described herein, for example, IL-2 bindings proteins such as IL-2Rα proteins, masking moieties including binding moieties and linkers, and other optional protein domains, to generate one or more activatable proproteins or larger, multi-chain structures comprising the same.

[0152] IL-2 Binding Proteins. The activatable proproteins described herein comprise at least one “IL-2 binding protein”. Examples of IL-2 binding proteins include IL-2Rα proteins, including human IL-2Rα proteins, and antibodies and antigen binding fragments thereof that bind to an IL-2 protein described herein.

[0153] In particular embodiments, the IL-2 binding protein is a human IL-2Rα protein, or a variant or fragment thereof that binds to an IL-2 protein. Exemplary human IL-2Rα amino acid sequences are provided in Table S2 below.

TABLE S2
Exemplary IL-2Rα Proteins

| | | SEQ ID |
|---|---|---|
| Name | Sequence | NO: |
| Human IL- | MDSYLLMWGLLTFIMVPGCQAELCDDDPPEIPHATFKAMAYKEGTMLNCECK | 4 |
| 2Rα FL | RGFRRIKSGSLYMLCTGNSSHSSWDNQCQCTSSATRNTTKQVTPQPEEQKER | |
| | KTTEMQSPMQPVDQASLPGHCREPPPWENEATERIYHFVVGQMVYYQCVQGY | |
| | RALHRGPAESVCKMTHGKTRWTQPQLICTGEMETSQFPGEEKPQASPEGRPE | |
| | SETSCLVTTTDFQIQTEMAATMETSIFTTEYQVAVAGCVFLLISVLLLSGLT | |
| | WQRRQRKSRRTI | |
| Human IL- | ELCDDDPPEIPHATFKAMAYKEGTMLNCECKRGFRRIKSGSLYMLCTGNSSH | 5 |
| 2Rα-ECD | SSWDNQCQCTSSATRNTTKQVTPQPEEQKERKTTEMQSPMQPVDQASLPGHC | |
| (22-240) | REPPPWENEATERIYHFVVGQMVYYQCVQGYRALHRGPAESVCKMTHGKTRW | |
| | TQPQLICTGEMETSQFPGEEKPQASPEGRPESETSCLVTTTDFQIQTEMAAT | |
| | METSIFTTEYQ | |
| Human IL- | ELCDDDPPEIPHATFKAMAYKEGTMLNCECKRGFRRIKSGSLYMLCTGNSSH | 6 |
| 2Rα-sushi | SSWDNQCQCTSSATRNTTKQVTPQPEEQKERKTTEMQSPMQPVDQASLPGHC | |
| (22-187) | REPPPWENEATERIYHFVVGQMVYYQCVQGYRALHRGPAESVCKMTHGKTRW | |
| | TQPQLICTGE | |
| Human IL- | ELCDDDPPEIPHATFKAMAYKEGTMLNCECKRGFRRISSGSLYMLCTGNSSH | 20 |
| 2Rα-sushi | SSWDNQCQCTSSATRNTTKQVTPQPEEQKERKTTEMQSPMQPVDQASLPGHC | |
| (22-187) | REPPPWENEATERIYHFVVGQMVYYQCVQGYRALHRGPAESVCKMTHGKTRW | |
| with K38S | TQPQLICTGE | |

[0154] Thus, in certain embodiments, an IL-2Rα protein comprises, consists, or consists essentially of an amino acid sequence selected from Table S2, or an active variant or fragment thereof that is at least 80, 85, 90, 95, 98, or 100% identical to a sequence selected from Table S2, and which binds to an IL-2 protein. In some embodiments, the IL-2Rα protein comprises, consists, or consists essentially of an amino acid sequence that is at least 80, 85, 90, 95, 98, or 100% to amino acids 22-187 or 22-240 of SEQ ID NO: 4 (full-length wild-type human IL-2Rα).

[0155] Certain IL-2Rα proteins comprise one or more defined amino acid substitutions relative to the exemplary amino acid sequences in Table S2. For example, in some instances the IL-2Rα protein comprises one or more cysteine substitutions selected from D4C, D6C, N27C, K38C, S39C, L42C, Y43C, I118C, and H120C as defined by SEQ ID NO: 6 (human IL-2Rα Sushi 1 to Sushi 2 domain). In some instances, the IL-2Rα protein comprises an alanine substitution at position 49 and/or 68 as defined by SEQ ID NO: 6. In some embodiments, the IL-2Rα protein comprises a K38S substitution as defined by SEQ ID NO:6. Thus, an IL-2Rα protein can comprise any one or more of the foregoing amino acid substitutions, including combinations thereof.

[0156] In certain of these and related embodiments, the IL-2Rα protein forms at least one disulfide bond with the IL-2 protein via one or more of the foregoing cysteines and one or more cysteines in the IL-2 protein. In specific embodiments, the IL-2Rα and IL-2 protein form disulfide at least one disulfide bond between one or more cysteine pairs selected from IL2-K35C and IL2Rα-D4C, IL2-R38C and IL2Rα-D6C, IL2-R38C and IL2Rα-H120C, IL2-T41C and IL2Rα-I118C, IL2-F42C and IL2Rα-N27C, IL2-E61C and IL2Rα-K38C, IL2-E61C and IL2Rα-S39C, and IL2-V69C and IL2Rα-L42C. In particular embodiments, as noted above, the binding (for example, disulfide binding) between the IL-2 protein and the IL-2Rα protein masks or sterically hinders the binding site of the IL-2 protein that preferentially binds to the IL-2Rα/β/γc chain expressed on T_{regs}. In some instances, the active or activated form of the protein, following cleavage of at least one linker and release of the corresponding masking moiety, retains the binding between the IL-2 protein and the IL-2Rα protein, and thus does not preferentially bind to the IL-2Rα/β/γc chain expressed on T_{regs}.

[0157] As noted above, in certain embodiments, the IL-2 binding protein comprises an antibody or antigen binding fragment thereof that specifically binds to the IL-2 protein. Examples include a whole antibody, Fab, Fab′, F(ab′)2, monospecific Fab2, bispecific Fab2, FV, single chain Fv (scFv), scFV-Fc, nanobody, diabody, camelid, and a minibody. In specific embodiments, the antibody is NARA1 or an antigen binding fragment thereof (see, for example, Arenas-Ramirez et al., Science Translational Medicine. 8: 367ra166, 2016; and U.S. Application No. 2019/0016797, herein incorporated by reference). In particular embodiments, and likewise to above, the binding (for example, disulfide binding) between the IL-2 protein and the anti-IL-2 antibody (or antigen binding fragment thereof) masks or sterically hinders the binding site of the IL-2 protein that preferentially binds to the IL-2Rα/β/γc chain expressed on T_{regs}. In some instances, the active or activated form of the protein, following cleavage of at least one linker and release of the corresponding masking moiety, retains the binding between the IL-2 protein and the IL-2Rα protein, and thus does not preferentially bind to the IL-2Rα/β/γc chain expressed on T_{regs}.

[0158] As used herein, the term “antibody” encompasses not only intact polyclonal or monoclonal antibodies, but also fragments thereof (such as dAb, Fab, Fab′, F(ab′)2, Fv), single chain (ScFv), synthetic variants thereof, naturally occurring variants, fusion proteins comprising an antibody portion with an antigen-binding fragment of the required specificity, humanized antibodies, chimeric antibodies, and any other modified configuration of the immunoglobulin molecule that comprises an antigen-binding site or fragment (epitope recognition site) of the required specificity. Certain features and characteristics of antibodies (and antigen-binding fragments thereof) are described in greater detail herein.

[0159] An antibody or antigen-binding fragment can be of essentially any type. As is well known in the art, an antibody is an immunoglobulin molecule capable of specific binding to a target, such as an immune checkpoint molecule, through at least one epitope recognition site, located in the variable region of the immunoglobulin molecule. The term “antigen-binding fragment” as used herein refers to a polypeptide fragment that contains at least one CDR of an immunoglobulin heavy and/or light chain that binds to the antigen of interest. In this regard, an antigen-binding fragment of the herein described antibodies may comprise 1, 2, 3, 4, 5, or all 6 CDRs of a V_{H} and V_{L} sequence from antibodies that bind to a target molecule.

[0160] The binding properties of antibodies and antigen-binding fragments thereof can be quantified using methods well known in the art (see Davies et al., Annual Rev. Biochem. 59:439-473, 1990). In some embodiments, an antibody or antigen-binding fragment thereof specifically binds to a target molecule, for example, an IL-2 protein or an epitope or complex thereof, with an equilibrium dissociation constant that is about or ranges from about ≤10⁻⁷ M to about 10⁻⁸ M. In some embodiments, the equilibrium dissociation constant is about or ranges from about ≤10⁻⁹ M to about ≤10⁻¹⁰ M. In certain illustrative embodiments, an antibody or antigen-binding fragment thereof has an affinity (Kd or EC₅₀) for an IL-2 protein (to which it specifically binds) of about, at least about, or less than about, 0.01, 0.05, 0.1, 0.2, 0.3, 0.4, 0.5, 0.6, 0.7, 0.8, 0.9, 1, 2, 3, 4, 5, 6, 7, 8, 9, 10, 11, 12, 13, 14, 15, 16, 17, 18, 19, 20, 21, 22, 23, 24, 25, 26, 27, 28, 29, 30, 40, or 50 nM.

[0161] A molecule such as a polypeptide or antibody is said to exhibit “specific binding” or “preferential binding” if it reacts or associates more frequently, more rapidly, with greater duration and/or with greater affinity with a particular cell, substance, or particular epitope than it does with alternative cells or substances, or epitopes. An antibody “specifically binds” or “preferentially binds” to a target molecule or epitope if it binds with greater affinity, avidity, more readily, and/or with greater duration than it binds to other substances or epitopes, for example, by a statistically significant amount. Typically one member of the pair of molecules that exhibit specific binding has an area on its surface, or a cavity, which specifically binds to and is therefore complementary to a particular spatial and/or polar organization of the other member of the pair of molecules. Thus, the members of the pair have the property of binding specifically to each other. For instance, an antibody that specifically or preferentially binds to a specific epitope is an antibody that binds that specific epitope with greater affinity, avidity, more readily, and/or with greater duration than it binds to other epitopes. It is also understood by reading this definition that, for example, an antibody (or moiety or epitope) that specifically or preferentially binds to a first target may or may not specifically or preferentially bind to a second target. The term is also applicable where, for example, an antibody is specific for a particular epitope which is carried by a number of antigens, in which case the specific binding member carrying the antigen-binding fragment or domain will be able to bind to the various antigens carrying the epitope; for example, it may be cross reactive to a number of different forms of a target antigen from multiple species that share a common epitope

[0162] Immunological binding generally refers to the non-covalent interactions of the type which occur between an immunoglobulin molecule and an antigen for which the immunoglobulin is specific, for example by way of illustration and not limitation, as a result of electrostatic, ionic, hydrophilic and/or hydrophobic attractions or repulsion, steric forces, hydrogen bonding, van der Waals forces, and other interactions. The strength, or affinity of immunological binding interactions can be expressed in terms of the dissociation constant (Kd) of the interaction, wherein a smaller Kd represents a greater affinity Immunological binding properties of selected polypeptides can be quantified using methods well known in the art. One such method entails measuring the rates of antigen-binding site/antigen complex formation and dissociation, wherein those rates depend on the concentrations of the complex partners, the affinity of the interaction, and on geometric parameters that equally influence the rate in both directions. Thus, both the “on rate constant” (Kon) and the “off rate constant” (Koff) can be determined by calculation of the concentrations and the actual rates of association and dissociation. The ratio of Koff /Kon enables cancellation of all parameters not related to affinity, and is thus equal to the dissociation constant Kd. As used herein, the term “affinity” includes the equilibrium constant for the reversible binding of two agents and is expressed as Kd or EC₅₀. Affinity of an antibody for an IL-2 protein or epitope can be, for example, from about 100 nanomolar (nM) to about 0.1 nM, from about 100 nM to about 1 picomolar (pM), or from about 100 nM to about 1 femtomolar (fM). As used herein, the term “avidity” refers to the resistance of a complex of two or more agents to dissociation after dilution.

[0163] Antibodies may be prepared by any of a variety of techniques known to those of ordinary skill in the art. See, e.g., Harlow and Lane, Antibodies: A Laboratory Manual, Cold Spring Harbor Laboratory, 1988. Monoclonal antibodies specific for a polypeptide of interest may be prepared, for example, using the technique of Kohler and Milstein, Eur. J. Immunol. 6:511-519, 1976, and improvements thereto. Also included are methods that utilize transgenic animals such as mice to express human antibodies. See, e.g., Neuberger et al., Nature Biotechnology 14:826, 1996; Lonberg et al., Handbook of Experimental Pharmacology 113:49-101, 1994; and Lonberg et al., Internal Review of Immunology 13:65-93, 1995. Particular examples include the VELOCIMMUNE® platform by REGENEREX® (see, e.g., U.S. Pat. No. 6,596,541).

[0164] In certain embodiments, antibodies and antigen-binding fragments thereof as described herein include a heavy chain and a light chain CDR set, respectively interposed between a heavy chain and a light chain framework region (FR) set which provide support to the CDRs and define the spatial relationship of the CDRs relative to each other. As used herein, the term “CDR set” refers to the three hypervariable regions of a heavy or light chain V region. Proceeding from the N-terminus of a heavy or light chain, these regions are denoted as “CDR1,” “CDR2,” and “CDR3” respectively. An antigen-binding site, therefore, includes six CDRs, comprising the CDR set from each of a heavy and a light chain V region. A polypeptide comprising a single CDR, (e.g., a CDR1, CDR2 or CDR3) is referred to herein as a “molecular recognition unit.” Crystallographic analysis of a number of antigen-antibody complexes has demonstrated that the amino acid residues of CDRs form extensive contact with bound antigen, wherein the most extensive antigen contact is with the heavy chain CDR3. Thus, the molecular recognition units are primarily responsible for the specificity of an antigen-binding site.

[0165] As used herein, the term “FR set” refers to the four flanking amino acid sequences which frame the CDRs of a CDR set of a heavy or light chain V region. Some FR residues may contact bound antigen; however, FRs are primarily responsible for folding the V region into the antigen-binding site, particularly the FR residues directly adjacent to the CDRs. Within FRs, certain amino residues and certain structural features are very highly conserved. In this regard, all V region sequences contain an internal disulfide loop of around 90 amino acid residues. When the V regions fold into a binding-site, the CDRs are displayed as projecting loop motifs which form an antigen-binding surface. It is generally recognized that there are conserved structural regions of FRs which influence the folded shape of the CDR loops into certain “canonical” structures—regardless of the precise CDR amino acid sequence. Further, certain FR residues are known to participate in non-covalent interdomain contacts which stabilize the interaction of the antibody heavy and light chains.

[0166] The structures and locations of immunoglobulin variable domains may be determined by reference to Kabat, E. A. et al., Sequences of Proteins of Immunological Interest. 4th Edition. US Department of Health and Human Services. 1987, and updates thereof.

[0167] Also include are “monoclonal” antibodies, which refer to a homogeneous antibody population wherein the monoclonal antibody is comprised of amino acids (naturally occurring and non-naturally occurring) that are involved in the selective binding of an epitope. Monoclonal antibodies are highly specific, being directed against a single epitope. The term “monoclonal antibody” encompasses not only intact monoclonal antibodies and full-length monoclonal antibodies, but also fragments thereof (such as Fab, Fab′, F(ab′)2, Fv), single chain (ScFv), variants thereof, fusion proteins comprising an antigen-binding portion, humanized monoclonal antibodies, chimeric monoclonal antibodies, and any other modified configuration of the immunoglobulin molecule that comprises an antigen-binding fragment (epitope recognition site) of the required specificity and the ability to bind to an epitope. It is not intended to be limited as regards the source of the antibody or the manner in which it is made (e.g., by hybridoma, phage selection, recombinant expression, transgenic animals). The term includes whole immunoglobulins as well as the fragments etc. described above under the definition of “antibody.”

[0168] The proteolytic enzyme papain preferentially cleaves IgG molecules to yield several fragments, two of which (the F(ab) fragments) each comprise a covalent heterodimer that includes an intact antigen-binding site. The enzyme pepsin is able to cleave IgG molecules to provide several fragments, including the F(ab′)2 fragment which comprises both antigen-binding sites. An Fv fragment for use according to certain embodiments can be produced by preferential proteolytic cleavage of an IgM, and on rare occasions of an IgG or IgA immunoglobulin molecule. Fv fragments are, however, more commonly derived using recombinant techniques known in the art. The Fv fragment includes a non-covalent VH::VL heterodimer including an antigen-binding site which retains much of the antigen recognition and binding capabilities of the native antibody molecule. See Inbar et al., PNAS USA. 69:2659-2662, 1972; Hochman et al., Biochem. 15:2706-2710, 1976; and Ehrlich et al., Biochem. 19:4091-4096, 1980.

[0169] In certain embodiments, single chain Fv (scFV) antibodies are contemplated. For example, Kappa bodies (Ill et al., Prot. Eng. 10:949-57, 1997); minibodies (Martin et al., EMBO J 13:5305-9, 1994); diabodies (Holliger et al., PNAS 90: 6444-8, 1993); or Janusins (Traunecker et al., EMBO J 10: 3655-59, 1991; and Traunecker et al., Int. J. Cancer Suppl. 7:51-52, 1992), may be prepared using standard molecular biology techniques following the teachings of the present application with regard to selecting antibodies having the desired specificity.

[0170] A single chain Fv (scFv) polypeptide is a covalently linked VH::VL heterodimer which is expressed from a gene fusion including VH- and VL-encoding genes linked by a peptide-encoding linker. Huston et al. (PNAS USA. 85(16):5879-5883, 1988). A number of methods have been described to discern chemical structures for converting the naturally aggregated—but chemically separated—light and heavy polypeptide chains from an antibody V region into an scFv molecule which will fold into a three dimensional structure substantially similar to the structure of an antigen-binding site. See, e.g., U.S. Pat. Nos. 5,091,513 and 5,132,405, to Huston et al.; and U.S. Pat. No. 4,946,778, to Ladner et al.

[0171] In certain embodiments, the antibodies or antigen-binding fragments described herein are in the form of a “diabody.” Diabodies are multimers of polypeptides, each polypeptide comprising a first domain comprising a binding region of an immunoglobulin light chain and a second domain comprising a binding region of an immunoglobulin heavy chain, the two domains being linked (e.g., by a peptide linker) but unable to associate with each other to form an antigen-binding site: antigen-binding sites are formed by the association of the first domain of one polypeptide within the multimer with the second domain of another polypeptide within the multimer (WO94/13804). A dAb fragment of an antibody consists of a VH domain (Ward et al., Nature 341:544-546, 1989). Diabodies and other multivalent or multispecific fragments can be constructed, for example, by gene fusion (see WO94/13804; and Holliger et al., PNAS USA. 90:6444-6448, 1993)).

[0172] Minibodies comprising a scFv joined to a CH3 domain are also included (see Hu et al., Cancer Res. 56:3055-3061, 1996). See also Ward et al., Nature. 341:544-546, 1989; Bird et al., Science. 242:423-426, 1988; Huston et al., PNAS USA. 85:5879-5883, 1988); PCT/US92/09965; WO94/13804; and Reiter et al., Nature Biotech. 14:1239-1245, 1996.

[0173] Where bispecific antibodies are to be used, these may be conventional bispecific antibodies, which can be manufactured in a variety of ways (Holliger and Winter, Current Opinion Biotechnol. 4:446-449, 1993), e.g., prepared chemically or from hybrid hybridomas, or may be any of the bispecific antibody fragments mentioned above. Diabodies and scFv can be constructed without an Fc region, using only variable domains, potentially reducing the effects of anti-idiotypic reaction.

[0174] Bispecific diabodies, as opposed to bispecific whole antibodies, may also be particularly useful because they can be readily constructed and expressed in E. coli. Diabodies (and many other polypeptides such as antibody fragments) of appropriate binding specificities can be readily selected using phage display (WO94/13804) from libraries. If one arm of the diabody is to be kept constant, for instance, with a specificity directed against antigen X, then a library can be made where the other arm is varied and an antibody of appropriate specificity selected. Bispecific whole antibodies may be made by knobs-into-holes engineering (Ridgeway et al., Protein Eng., 9:616-621, 1996).

[0175] In certain embodiments, the antibodies or antigen-binding fragments described herein are in the form of a UniBody®. A UniBody® is an IgG4 antibody with the hinge region removed (see GenMab Utrecht, The Netherlands; see also, e.g., US20090226421). This antibody technology creates a stable, smaller antibody format with an anticipated longer therapeutic window than current small antibody formats. IgG4 antibodies are considered inert and thus do not interact with the immune system. Fully human IgG4 antibodies may be modified by eliminating the hinge region of the antibody to obtain half-molecule fragments having distinct stability properties relative to the corresponding intact IgG4 (GenMab, Utrecht). Halving the IgG4 molecule leaves only one area on the UniBody® that can bind to cognate antigens (e.g., disease targets) and the UniBody® therefore binds univalently to only one site on target cells. For certain cancer cell surface antigens, this univalent binding may not stimulate the cancer cells to grow as may be seen using bivalent antibodies having the same antigen specificity, and hence UniBody® technology may afford treatment options for some types of cancer that may be refractory to treatment with conventional antibodies. The small size of the UniBody® can be a great benefit when treating some forms of cancer, allowing for better distribution of the molecule over larger solid tumors and potentially increasing efficacy.

[0176] In certain embodiments, the antibodies and antigen-binding fragments described herein are in the form of a nanobody. Minibodies are encoded by single genes and are efficiently produced in almost all prokaryotic and eukaryotic hosts, for example, E. coli (see U.S. Pat. No. 6,765,087), molds (for example Aspergillus or Trichoderma) and yeast (for example Saccharomyces, Kluyvermyces, Hansenula or Pichia (see U.S. Pat. No. 6,838,254). The production process is scalable and multi-kilogram quantities of nanobodies have been produced. Nanobodies may be formulated as a ready-to-use solution having a long shelf life. The Nanoclone method (see WO 06/079372) is a proprietary method for generating Nanobodies against a desired target, based on automated high-throughput selection of B-cells. Also included are heavy chain dimers, such as antibodies from camelids and sharks. Camelid and shark antibodies comprise a homodimeric pair of two chains of V-like and C-like domains (neither has a light chain). Since the VH region of a heavy chain dimer IgG in a camelid does not have to make hydrophobic interactions with a light chain, the region in the heavy chain that normally contacts a light chain is changed to hydrophilic amino acid residues in a camelid. VH domains of heavy-chain dimer IgGs are called VHH domains. Shark Ig-NARs comprise a homodimer of one variable domain (termed a V-NAR domain) and five C-like constant domains (C-NAR domains).

[0177] In camelids, the diversity of antibody repertoire is determined by the complementary determining regions (CDR) 1, 2, and 3 in the VH or VHH regions. The CDR3 in the camel VHH region is characterized by its relatively long length averaging 16 amino acids (Muyldermans et al., 1994, Protein Engineering 7(9): 1129). This is in contrast to CDR3 regions of antibodies of many other species. For example, the CDR3 of mouse VH has an average of 9 amino acids. Libraries of camelid-derived antibody variable regions, which maintain the in vivo diversity of the variable regions of a camelid, can be made by, for example, the methods disclosed in U.S. Patent Application Ser. No. 20050037421, published Feb. 17, 2005

[0178] In certain embodiments, the antibodies or antigen-binding fragments thereof are humanized. These embodiments refer to a chimeric molecule, generally prepared using recombinant techniques, having an antigen-binding site derived from an immunoglobulin from a non-human species and the remaining immunoglobulin structure of the molecule based upon the structure and/or sequence of a human immunoglobulin. The antigen-binding site may comprise either complete variable domains fused onto constant domains or only the CDRs grafted onto appropriate framework regions in the variable domains. Epitope binding sites may be wild type or modified by one or more amino acid substitutions. This eliminates the constant region as an immunogen in human individuals, but the possibility of an immune response to the foreign variable region remains (LoBuglio et al., PNAS USA 86:4220-4224, 1989; Queen et al., PNAS USA. 86:10029-10033, 1988; Riechmann et al., Nature. 332:323-327, 1988). Illustrative methods for humanization of antibodies include the methods described in U.S. Pat. No. 7,462,697.

[0179] Another approach focuses not only on providing human-derived constant regions, but modifying the variable regions as well so as to reshape them as closely as possible to human form. It is known that the variable regions of both heavy and light chains contain three complementarity-determining regions (CDRs) which vary in response to the epitopes in question and determine binding capability, flanked by four framework regions (FRs) which are relatively conserved in a given species and which putatively provide a scaffolding for the CDRs. When nonhuman antibodies are prepared with respect to a particular epitope, the variable regions can be “reshaped” or “humanized” by grafting CDRs derived from nonhuman antibody on the FRs present in the human antibody to be modified. Application of this approach to various antibodies has been reported by Sato et al., Cancer Res. 53:851-856, 1993; Riechmann et al., Nature 332:323-327, 1988; Verhoeyen et al., Science 239:1534-1536, 1988; Kettleborough et al., Protein Engineering. 4:773-3783, 1991; Maeda et al., Human Antibodies Hybridoma 2:124-134, 1991; Gorman et al., PNAS USA. 88:4181-4185, 1991; Tempest et al., Bio/Technology 9:266-271, 1991; Co et al., PNAS USA. 88:2869-2873, 1991; Carter et al., PNAS USA. 89:4285-4289, 1992; and Co et al., J Immunol. 148:1149-1154, 1992. In some embodiments, humanized antibodies preserve all CDR sequences (for example, a humanized mouse antibody which contains all six CDRs from the mouse antibodies). In other embodiments, humanized antibodies have one or more CDRs (one, two, three, four, five, six) which are altered with respect to the original antibody, which are also termed one or more CDRs “derived from” one or more CDRs from the original antibody.

[0180] In certain embodiments, the antibodies are “chimeric” antibodies. In this regard, a chimeric antibody is comprised of an antigen-binding fragment of an antibody operably linked or otherwise fused to a heterologous Fc portion of a different antibody. In certain embodiments, the Fc domain or heterologous Fc domain is of human origin. In certain embodiments, the Fc domain or heterologous Fc domain is of mouse origin. In other embodiments, the heterologous Fc domain may be from a different Ig class from the parent antibody, including IgA (including subclasses IgA1 and IgA2), IgD, IgE, IgG (including subclasses IgG1, IgG2, IgG3, and IgG4), and IgM. In further embodiments, the heterologous Fc domain may be comprised of CH2 and CH3 domains from one or more of the different Ig classes. As noted above with regard to humanized antibodies, the antigen-binding fragment of a chimeric antibody may comprise only one or more of the CDRs of the antibodies described herein (e.g., 1, 2, 3, 4, 5, or 6 CDRs of the antibodies described herein), or may comprise an entire variable domain (VL, VH or both).

[0181] It will be appreciated that any one or more of the foregoing IL-2 binding proteins can be combined with any of the other components described herein, for example, IL-2 proteins, masking moieties including binding moieties and linkers, and other optional protein domains, to generate one or more activatable proproteins or larger, multi-chain structures comprising the same.

[0182] Binding Moieties. As noted above, the activatable proprotein homodimers described herein comprise a first polypeptide and a second polypeptide, each of which comprises a “binding moiety”. The binding moiety facilitates and further stabilizes the binding interaction between the first and second polypeptides. In some embodiments, the binding moieties do not bind to the IL-2 protein or the IL-2 binding protein.

[0183] General examples of binding moieties are provided in Table M1 below.

TABLE M1
Exemplary Binding Moieties

Short peptide
Leucine zipper peptide
VH
VL
VH-CH1
VL-CL
VH-CL
VL-CH1
CH3
CH2CH3
Fab-CH3
Fab-CH2CH3
Antigen binding domain-CH3
Antigen binding domain-CH2CH3
CH3 variant
CH2CH3 variant
Fab-CH3 variant
Fab-CH2CH3 variant
Antigen binding domain-CH3 variant
Antigen binding domain-CH2CH3 variant

[0184] Thus, in certain embodiments, a binding moiety is selected from Table M1.

[0185] In particular embodiments, a binding moiety comprises an antigen binding domain of an immunoglobulin, including antigen binding fragments and variants thereof, such as a VL domain and/or a VH domain. In some embodiments, an antigen binding domain does not bind to an antigen, for example, a human antigen. In some embodiments, an antigen binding domain binds to an antigen, for example, a human antigen.

[0186] In some embodiments, a binding moiety comprises a constant domain of an immunoglobulin, or a fragment or variant thereof. For example, in certain embodiments a binding moiety comprises a CH1, CH2, CH3, CH1CH3, CH2CH3, CH1CH2CH3, and/or CL domain of an immunoglobulin, including fragments and variants thereof, and combinations thereof. In some instances, the light chain (CL) is a lambda or kappa chain. In some embodiments, the constant domains present in binding moiety of an activatable proprotein homodimer provided herein is glycosylated. In some embodiments, the glycosylation is N-glycosylation. In some embodiments, the glycosylation is O-glycosylation.

[0187] In specific embodiments, a binding moiety comprises, in an N- to C- terminal orientation: (1) an antigen binding domain of an immunoglobulin, including antigen binding fragments and variants thereof; and (2) an immunoglobulin constant domain, including fragments and variants thereof, for example, a CH1, CH2, CH3, CH1CH3, CH2CH3, CH1CH2CH3, and/or CL domain of an immunoglobulin, including combinations thereof. In specific embodiments, a binding moiety comprises, consists, or consists essentially of a CH2CH3 domain of an immunoglobulin.

[0188] The immunoglobulin domains used herein (antigen binding domains, constant domains) optionally comprise IgG domains. However, certain embodiments comprise alternate immunoglobulins such as IgM, IgA, IgD, and IgE. Furthermore, all possible isotypes of the various immunoglobulins are also encompassed within the current embodiments. Thus, IgG1, IgG2, IgG3, etc., are all possible molecules in the binding domains. In addition to choice in selection of the type of immunoglobulin and isotype, certain embodiments comprise various hinge regions (or functional equivalents thereof). Such hinge regions provide flexibility between the different domains of the proproteins described herein. In some embodiments, the immunoglobulin portion of the binding domain (or larger masking moiety) is from an immunoglobulin class selected from IgG1, IgG2, IgG3, IgG4, IgD, IgA, and IgM.

[0189] Linkers. As noted above, in certain embodiments, each polypeptide comprises at least one or two linkers, or peptide linkers. In some embodiments, at least one of the linkers is a cleavable linker, for example, a cleavable linker that comprises a protease cleavage site. In some embodiments, at least one of the linkers is a non-cleavable linker, that is, a physiologically-stable linker.

[0190] In some embodiments, the first linker and/or the second linker are about 1-50, 1-40, 1-30, 1-20, 1-10, 1-5, 1-4, 1-3 amino acids in length, or about 1, 2, 3, 4, 5, 6, 7, 8, 9, 10, 11, 12, 13, 14, 15, 16, 17, 18, 19, 20, 21, 22, 23, 24, 25, 26, 27, 28, 29, 30, 31, 32, 33, 34, 35, 36, 37, 38, 39, 40, 41, 42, 43, 44, 45, 46, 47, 48, 49, 50 amino acids in length. In particular embodiments, the first linker is a cleavable linker, and the second linker is a non-cleavable linker. In some embodiments, the first linker is a non-cleavable linker, and the second linker is a cleavable linker. In some embodiments, both linkers are cleavable linkers. In some embodiments, a cleavable linker comprises at least one protease cleavage site.

[0191] Suitable protease cleavages sites and self-cleaving peptides are known to the skilled person (see, e.g., Ryan et al., J. Gener. Virol. 78:699-722, 1997; and Scymczak et al., Nature Biotech. 5:589-594, 2004). In some embodiments, the protease cleavage site is cleavable by a protease selected from one or more of a metalloprotease, a serine protease, a cysteine protease, and an aspartic acid protease. In particular embodiments, the protease cleavage site is cleavable by a protease selected from one or more of MMP1, MMP2, MMP3, MMP4, MMP5, MMP6, MMP7, MMP8, MMP9, MMP10, MMP11, MMP12, MMP13, MMP14, TEV protease, matriptase, uPA, FAP, Legumain, PSA, Kallikrein, Cathepsin A, and Cathepsin B.

[0192] Examples of cleavable linkers are provided in Table S3 below.

TABLE S3
Exemplary cleavable linkers

| Name | Sequence | SEQ ID NO: |
|---|---|---|
| CTMX | GSLSGRSDNHGS | 21 |
| PS1 | GSLGGSGRSANAGS | 22 |
| PS2 | GGSLSGRSANAGGS | 23 |
| PS3 | GPLGLAGRSANAGS | 24 |
| PS4 | PLGLSGRSANAGPA | 25 |
| PS5 | PLGLAGRSANAGPA | 26 |
| PS6 | GPLGLSGRSANAGPASG | 27 |
| PS7 | GPLGLAGRSANAGPASG | 28 |
| PS8 | SGPLGLAGRSANAGPAS | 29 |
| PS9 | SGPASGRSANAPLGLAG | 30 |
| PS10 | GSGPASGRSANAPLGLAGS | 31 |
| PS11 | GPLGLAGRSANPGPASG | 32 |
| PS12 | GPLGLAGRSDNHGPASG | 33 |
| PS13 | GPLGLAGRSDNPGPASG | 34 |
| PS14 | GPLGLAGRSENPGPASG | 35 |
| PS15 | GPLGLAGRSDNLGPASG | 36 |
| PS16 | GPLGLAGRNAQVGPASG | 37 |
| PS17 | GSLSGRSDNAGS | 38 |
| PS18 | GSLSGRSDNDGS | 39 |
| PS19 | GSLSGRSDNEGS | 40 |
| PS20 | GSLSGRSDNFGS | 41 |
| PS21 | GSLSGRSDNGGS | 42 |
| PS22 | GSLSGRSDNIGS | 43 |
| PS23 | GSLSGRSDNKGS | 44 |
| PS24 | GSLSGRSDNLGS | 45 |
| PS25 | GSLSGRSDNMGS | 46 |
| PS26 | GSLSGRSDNNGS | 47 |
| PS27 | GSLSGRSDNPGS | 48 |
| PS28 | GSLSGRSDNQGS | 49 |
| PS29 | GSLSGRSDNRGS | 50 |
| PS30 | GSLSGRSDNSGS | 51 |
| PS31 | GSLSGRSDNTGS | 52 |
| PS32 | GSLSGRSDNVGS | 53 |
| PS33 | GSLSGRSDNWGS | 54 |
| PS34 | GSLSGRSDNYGS | 55 |
| PS35 | GSLSGRSANDGS | 56 |
| PS36 | GSLSGRSANEGS | 57 |
| PS37 | GSLSGRSANFGS | 58 |
| PS38 | GSLSGRSANGSS | 59 |
| PS39 | GSLSGRSANHGS | 60 |
| PS40 | GSLSGRSANIGS | 61 |
| PS41 | GSLSGRSANKGS | 62 |
| PS42 | GSLSGRSANLGS | 63 |
| PS43 | GSLSGRSANMGS | 64 |
| PS44 | GSLSGRSANNGS | 65 |
| PS45 | GSLSGRSANPGS | 66 |
| PS46 | GSLSGRSANQSS | 67 |
| PS47 | GSLSGRSANRGS | 68 |
| PS48 | GSLSGRSANSGS | 69 |
| PS49 | GSLSGRSANTGS | 70 |
| PS50 | GSLSGRSANVGS | 71 |
| PS51 | GSLSGRSANWGS | 72 |
| PS52 | GSLSGRSANYSS | 73 |
| PS12b | GPLGLAGRSDNHSG | 74 |
| PS53 | PLGLAGSGRSDNR | 75 |
| PS54 | PLGLAGSGRSDNRGS | 76 |
| PS55 | GSPLGLAGSGRSDNRGS | 77 |
| PS103 | PLGLAGSGRSDNRGA | 78 |
| PS104 | PLGLAGSGRSDNQGA | 79 |
| PS105 | PLGLAGSGRSDNYGA | 80 |
| PS106 | GPLGLAGSGRSDNQG | 81 |
| PS107 | GSPLGLAGSGRSDNQGA | 82 |
| PS108 | GGSPLGLAGSGRSDNQGGA | 83 |
| PS109 | GGGSPLGLAGSGRSDNQGGGA | 84 |
| PS110 | GGSGSPLGLAGSGRSDNQGGGGA | 85 |
| PS111 | GGSGGSPLGLAGSGRSDNQGGSGGA | 86 |
| PS112 | GPLGLAGSGRSDNRG | 87 |
| PS113 | GSPLGLAGSGRSDNRGA | 88 |
| PS114 | GGSPLGLAGSGRSDNRGGA | 89 |
| PS115 | GGGSPLGLAGSGRSDNRGGGA | 90 |
| PS116 | GGSGSPLGLAGSGRSDNRGGGGA | 91 |
| PS117 | GGSGGSPLGLAGSGRSDNRGGSGGA | 92 |
| PS118 | GGSGGSPLGLAGSGRSDNHGGSGGA | 93 |
| | PLGLAGSGRSDNQGA | 94 |
| | GPLGLAGSGRSDNQGA | 95 |
| | GGPLGLAGSGRSDNQGA | 96 |
| | GGSPLGLAGSGRSDNHGGA | 97 |
| | GGSPLGLAGSGRSDNQGGA | 98 |
| | GGSPLGLAGSGRSDNRGGA | 99 |
| | GGSPLGLAGSGRSDNTGGA | 100 |
| | GGGSGRSDNHGGA | 101 |
| | GGGGSGRSDNHGGA | 102 |
| | GGGGSSGRSDNHGGGA | 103 |
| | GGSGGSSGRSDNHGGGGA | 104 |
| | GGSGGSSGRSDNHGGSGGA | 105 |
| | GGSGRSDNHGGA | 106 |
| | GGSGGSGRSDNHGGA | 107 |
| | GSPLGLAGS | 108 |
| | GGSPLGLAGGS | 109 |
| | GGSPLGLAGGGS | 110 |
| | GGGSPLGLAGGGS | 111 |
| | GGGSPLGLAGGGGS | 112 |
| | GGSGGGPLGLAGGGA | 113 |
| | GGSGGSGRSDNHGGA | 114 |
| | SGRSDNA | 442 |
| | SGRSDND | 443 |
| | SGRSDNE | 444 |
| | SGRSDNF | 445 |
| | SGRSDNG | 446 |
| | SGRSDNI | 447 |
| | SGRSDNK | 448 |
| | SGRSDNL | 449 |
| | SGRSDNM | 450 |
| | SGRSDNN | 451 |
| | SGRSDNP | 452 |
| | SGRSDNQ | 453 |
| | SGRSDNR | 454 |
| | SGRSDNS | 455 |
| | SGRSDNT | 456 |
| | SGRSDNV | 457 |
| | SGRSDNW | 458 |
| | SGRSDNY | 459 |
| | SGRSAND | 460 |
| | SGRSANE | 461 |
| | SGRSANF | 462 |
| | SGRSANG | 463 |
| | SGRSANH | 464 |
| | SGRSANI | 465 |
| | SGRSANK | 466 |
| | SGRSANL | 467 |
| | SGRSANM | 468 |
| | SGRSANN | 469 |
| | SGRSANP | 470 |
| | SGRSANQ | 471 |
| | SGRSANR | 472 |
| | SGRSANS | 473 |
| | SGRSANT | 474 |
| | SGRSANV | 475 |
| | SGRSANW | 476 |
| | SGRSANY | 477 |

[0193] Thus, in certain embodiment, a cleavable linker is selected from Table S3. Additional examples of cleavable linkers include an amino acid sequence cleaved by a serine protease such as thrombin, chymotrypsin, trypsin, elastase, kallikrein, or subtilisin. Illustrative examples of thrombin-cleavable amino acid sequences include, but are not limited to: -Gly-Arg-Gly-Asp-(SEQ ID NO:115), -Gly-Gly-Arg-, -Gly-Arg-Gly-Asp-Asn-Pro-(SEQ ID NO: 116), -Gly-Arg-Gly-Asp-Ser-(SEQ ID NO: 117), -Gly-Arg-Gly-Asp-Ser-Pro-Lys-(SEQ ID NO: 118), -Gly-Pro-Arg-, -Val-Pro-Arg-, and -Phe-Val-Arg-. Illustrative examples of elastase-cleavable amino acid sequences include, but are not limited to: -Ala-Ala-Ala-, -Ala-Ala-Pro-Val-(SEQ ID NO: 119), -Ala-Ala-Pro-Leu-(SEQ ID NO: 120), -Ala-Ala-Pro-Phe-(SEQ ID NO: 121), -Ala-Ala-Pro-Ala-(SEQ ID NO: 122), and -Ala-Tyr-Leu-Val-(SEQ ID NO: 123).

[0194] Cleavable linkers also include amino acid sequences that can be cleaved by a matrix metalloproteinase such as collagenase, stromelysin, and gelatinase. Illustrative examples of matrix metalloproteinase-cleavable amino acid sequences include, but are not limited to: -Gly-Pro-Y-Gly-Pro-Z-(SEQ ID NO: 124), -Gly-Pro-, Leu-Gly-Pro-Z-(SEQ ID NO: 125), -Gly-Pro-Ile-Gly-Pro-Z- (SEQ ID NO: 126), and -Ala-Pro-Gly-Leu-Z-(SEQ ID NO: 127), where Y and Z are amino acids. Illustrative examples of collagenase-cleavable amino acid sequences include, but are not limited to: -Pro-Leu-Gly-Pro-D-Arg-Z-(SEQ ID NO: 128), -Pro- Leu-Gly-Leu-Leu-Gly-Z-(SEQ ID NO: 129), -Pro-Gln-Gly-Ile-Ala-Gly-Trp-(SEQ ID NO: 130), -Pro-Leu-Gly-Cys(Me)-His-(SEQ ID NO: 131), -Pro-Leu-Gly-Leu-Tyr-Ala-(SEQ ID NO: 132), -Pro-Leu-Ala-Leu-Trp-Ala-Arg-(SEQ ID NO: 133), and -Pro-Leu-Ala-Tyr-Trp-Ala-Arg-(SEQ ID NO: 134), where Z is an amino acid. An illustrative example of a stromelysin-cleavable amino acid sequence is -Pro-Tyr-Ala-Tyr-Tyr-Met-Arg- (SEQ ID NO: 135); and an example of a gelatinase-cleavable amino acid sequence is -Pro-Leu-Gly-Met-Tyr-Ser-Arg-(SEQ ID NO: 136).

[0195] Cleavable linkers also include amino acid sequences that can be cleaved by an angiotensin converting enzyme, such as, for example, -Asp-Lys-Pro-, -Gly-Asp-Lys-Pro-(SEQ ID NO: 137), and -Gly-Ser-Asp-Lys-Pro- (SEQ ID NO: 138). Cleavable linkers also include amino acid sequences that can be degraded by cathepsin B, such as, for example, Val-Cit, Ala-Leu-Ala-Leu-(SEQ ID NO: 139), Gly-Phe-Leu-Gly-(SEQ ID NO: 140) and Phe-Lys.

[0196] In particular embodiments, a cleavable linker has a half life at pH 7.4, 25° C., for example, at physiological pH, human body temperature (e.g., in vivo, in serum, in a given tissue), of about or less than about 30 minutes, 1 hour, 2 hours, 3 hours, 4 hours, 5 hours, 6 hours, 12 hours, 18 hours, 24 hours, 36 hours, 48 hours, 72 hours, or 96 hours, or any intervening half-life.

[0197] Typically, at least one of the first or second linker is a non-cleavable linker. Exemplary non-cleavable linkers include those disclosed in Maratea et al., Gene 40:39-46, 1985; Murphy et al., PNAS USA. 83:8258-8262, 1986; U.S. Pat. Nos. 4,935,233 and 4,751,180. Particular non-cleavable linker sequences contain Gly, Ser, and/or Asn residues. Other near neutral amino acids, such as Thr and Ala may also be employed in the peptide linker sequence, if desired.

[0198] Certain exemplary non-cleavable linkers include Gly, Ser and/or Asn-containing linkers, as follows: [G]ₓ, [S]ₓ, [N]ₓ, [GS]ₓ, [GGS]ₓ, [GSS]ₓ, [GSGS]ₓ (SEQ ID NO: 141), [GGSG]ₓ (SEQ ID NO: 142), [GGGS]ₓ (SEQ ID NO: 143), [GGGGS]ₓ (SEQ ID NO: 144), [GN]ₓ, [GGN]ₓ, [GNN]ₓ, [GNGN]ₓ (SEQ ID NO: 145), [GGNG]ₓ (SEQ ID NO: 146), [GGGN]ₓ (SEQ ID NO: 147), [GGGGN]ₓ (SEQ ID NO: 148) linkers, where x is 1, 2, 3, 4, 5, 6, 7, 8, 9, 10, 11, 12, 13, 14, 15, 16, 17, 18, 19, or 20 or more. Other combinations of these and related amino acids will be apparent to persons skilled in the art.

[0199] Additional examples of non-cleavable linkers include the following amino acid sequences: Gly-Gly-Gly-Gly-Ser-Gly-Gly-Gly-Gly-Ser-Gly-Gly-Gly-Gly-Ser-(SEQ ID NO: 149); Gly-Ser-Gly-Gly-Gly-Gly-Ser-Gly-Gly-Gly-Gly-Ser-Gly-Gly-Gly-Gly-Ser-Gly-Gly-Gly-Gly-Ser-(SEQ ID NO: 150); Gly-Gly-Gly-Gly-Ser-Gly-Gly-Gly-Gly-Ser-Gly-Gly-Gly-Gly-Ser-Gly-Gly-Gly-Gly-Ser-Gly-Gly-Gly-Gly-Ser-Gly-Gly-Gly-Gly-Ser-(SEQ ID NO: 151); Asp-Ala-Ala-Ala-Lys-Glu-Ala-Ala-Ala-Lys-Asp-Ala-Ala-Ala-Arg-Glu-Ala-Ala-Ala-Arg-Asp-Ala-Ala-Ala-Lys-(SEQ ID NO: 152); and Asn-Val-Asp-His-Lys-Pro-Ser-Asn-Thr-Lys-Val-Asp-Lys-Arg-(SEQ ID NO: 153).

[0200] Further non-limiting examples of non-cleavable linkers include DGGGS (SEQ ID NO: 154); TGEKP (SEQ ID NO: 155) (see, e.g., Liu et al., PNAS. 94:5525-5530, 1997); GGRR (SEQ ID NO: 156) (Pomerantz et al. 1995); (GGGGS)ₙ (SEQ ID NO: 144) (Kim et al., PNAS. 93:1156-1160, 1996); EGKSSGSGSESKVD (SEQ ID NO: 157) (Chaudhary et al., PNAS. 87:1066-1070, 1990); KESGSVSSEQLAQFRSLD (SEQ ID NO: 158) (Bird et al., Science. 242:423-426, 1988), GGRRGGGS (SEQ ID NO: 159); LRQRDGERP (SEQ ID NO: 160); LRQKDGGGSERP (SEQ ID NO: 161); LRQKd(GGGS)₂ ERP (SEQ ID NO: 162). In specific embodiments, the linker comprises a Gly3 linker sequence, which includes three glycine residues. In particular embodiments, flexible linkers can be rationally designed using a computer program capable of modeling both DNA-binding sites and the peptides themselves (Desjarlais & Berg, PNAS. 90:2256-2260, 1993; and PNAS. 91:11099-11103, 1994) or by phage display methods.

[0201] In some embodiment, a linker comprises an immunoglobulin (Ig)/antibody hinge region or fragment thereof, for example, a hinge region obtained or derived from an IgG1 antibody. In some embodiments, the term Ig “hinge” region refers to a polypeptide comprising an amino acid sequence that shares sequence identity, or similarity, with a portion of a naturally-occurring Ig hinge region sequence, which optionally includes the cysteine residues at which the disulfide bonds link the two heavy chains of the immunoglobulin. Sequence similarity of the hinge region linkers of the present invention with naturally-occurring immunoglobulin hinge region amino acid sequences can range from at least 50% to about 75-80%, and typically greater than about 90%.

[0202] In some embodiments, the linker comprises a spacer element and a cleavable element so as to make the cleavable element more accessible to the enzyme responsible for cleavage.

[0203] It will be appreciated that any one or more of the foregoing linkers can be combined with any one or more of the binding moieties, IL-2 proteins, IL-2 binding proteins, and/or purification tags described herein, to form an activatable proprotein homodimer of the disclosure.

[0204] Affinity Purification Tags. In certain embodiments, the first and second polypeptides comprise at least one affinity purification tag. Exemplary affinity purification tags including a polyhistidine tag (optionally hexahistidine tag), a VSV-G tag (YTDIEMNRLGK; SEQ ID NO:163), a universal tag (HTTPHH; SEQ ID NO:164), a Strep-tag (WSHPQFEK; SEQ ID NO:165) or AWAHPQPGG; SEQ ID NO:166), an S-tag (KETAAAKFERQHMDS; SEQ ID NO:167), an S1-tag (NANNPDWDF; SEQ ID NO:168), a Phe-tag (composed, for example, of about 3, 4, 5, 6, 7, 8, 9, 10, 11, or 12 Phe residues), a Cys-tag (composed, for example, of about 3, 4, 5, 6, 7, 8, 9, 10, 11, or 12 Cys residues), an Asp-tag (composed, for example, of about 3, 4, 5, 6, 7, 8, 9, 10, 11, or 12 Asp residues), an Arg-tag (composed, for example, of about 3, 4, 5, 6, 7, 8, 9, 10, 11, or 12 Arg residues), a Myc epitope tag (CEQKLISEEDL, SEQ ID NO:169), a KT3 epitope tag (KPPTPPPEPET, SEQ ID NO:170), an HSV epitope tag (QPELAPED; SEQ ID NO:171), a histidine affinity tag (KDHLIHNVHKEFHAHAHNK; SEQ ID NO:172), a hemagglutinin (HA) tag, a FLAG epitope tag (DYKDDDK; SEQ ID NO:173), an E2 epitope tag (SSTSSDFRDR; SEQ ID NO:174), a V5-tag (GKPIPNPLLGLDST; SEQ ID NO:175), a T7-tag (MASMTGGQQMG; SEQ ID NO:176), an AU5 epitope tag (TDFYLK; SEQ ID NO:177), and an AU1 epitope tag (DTYRYI; SEQ ID NO:178).

[0205] Additional Domains. Certain activatable proproteins comprise one or more additional domains, for example, binding domains. In some embodiments, each of polypeptides in an activatable proprotein further comprise a protein domain A at one free terminus and/or a protein domain B at the other free terminus.

[0206] In some embodiments, the protein domains A and B are the same or different. In particular embodiments, the protein domains A and B are selected from one or more of cell receptor targeting moieties optionally bi-specific targeting moieties, antigen binding domains optionally bi-specific antigen binding domains, cell membrane receptor extracellular domains (ECDs), Fc domains, human serum albumin (HSA), Fc binding domains, HSA binding domains, cytokines, chemokines, and soluble protein ligands

[0207] In some embodiments, the one or more additional protein domains can be used to form complexes of two, three, four, five, or more activatable proproteins, which are bound to together via the additional domain(s).

[0208] Illustrative examples of activatable proproteins and certain of their expected cleavage products are provided in Table S4 below (see also the Examples).

TABLE S4
Exemplary Activatable Proproteins

| | | |
|---|---|---|
| | | SEQ ID |
| Name | Sequence | NO: |

P1522 Activatable Proprotein

| | | |
|---|---|---|
| Chains 1 | APTSSSTKKTQLQLEHLLLDLQMILNGINNYKNPKLTRMLTFKFYMPKKATEL | 179 |
| and 2: | KHLQCLEEELKPLEEALNLAPSKNFHLRPRDLISNINVIVLELKGSETTFMCE | |
| L5R- | YADETATIVEFLNRWITFSQSTISTLTGGGGSELCDDDPPEIPHATFKAMAYK | |
| GGGGS- | EGTMLNCECKRGFRRIKSGSLYMLCTGNSSHSSWDNQCQCTSSATRNTTKQVT | |
| his6 | PQPEEQKERKTTEMQSPMQPVDQASLPGHCREPPPWENEATERIYHFVVGQMV | |
| | YYQCVQGYRALHRGPAESVCKMTHGKTRWTQPQLICTGEGGGGSHHHHHH | |

P1523 Activatable Proprotein

| | | |
|---|---|---|
| Chains 1 | EPKSSDKTHTCPPCPAPELLGGPSVFLFPPKPKDTLMISRTPEVTCVVVDVSH | 180 |
| and 2: | EDPEVKFNWYVDGVEVHNAKTKPREEQYNSTYRVVSVLTVLHQDWLNGKEYKC | |
| Fc- | KVSNKALPAPIEKTISKAKGQPREPQVYTLPPSREEMTKNQVSLTCLVKGFYP | |
| GSENLYFQ | SDIAVEWESNGQPENNYKTTPPVLDSDGSFFLYSKLTVDKSRWQQGNVFSCSV | |
| G-GS-L5R | MHEALHNHYTQKSLSLSPGKGSENLYFQGGSAPTSSSTKKTQLQLEHLLLDLQ | |
| | MILNGINNYKNPKLTRMLTFKFYMPKKATELKHLQCLEEELKPLEEALNLAPS | |
| | KNFHLRPRDLISNINVIVLELKGSETTFMCEYADETATIVEFLNRWITFSQST | |
| | ISTLTGGGGSELCDDDPPEIPHATFKAMAYKEGTMLNCECKRGFRRIKSGSLY | |
| | MLCTGNSSHSSWDNQCQCTSSATRNTTKQVTPQPEEQKERKTTEMQSPMQPVD | |
| | QASLPGHCREPPPWENEATERIYHFVVGQMVYYQCVQGYRALHRGPAESVCKM | |
| | THGKTRWTQPQLICTGE | |

P1523 Cleaved proteins (Complete TEV cleavage)

| | | |
|---|---|---|
| Chains 1 | EPKSSDKTHTCPPCPAPELLGGPSVFLFPPKPKDTLMISRTPEVTCVVVDVSH | 181 |
| and 2: | EDPEVKFNWYVDGVEVHNAKTKPREEQYNSTYRVVSVLTVLHQDWLNGKEYKC | |
| Fc- | KVSNKALPAPIEKTISKAKGQPREPQVYTLPPSREEMTKNQVSLTCLVKGFYP | |
| GSENLYFQ | SDIAVEWESNGQPENNYKTTPPVLDSDGSFFLYSKLTVDKSRWQQGNVFSCSV | |
| | MHEALHNHYTQKSLSLSPGKGSENLYFQ | |
| Chains 3 | GGSAPTSSSTKKTQLQLEHLLLDLQMILNGINNYKNPKLTRMLTFKFYMPKKA | 182 |
| and 4: | TELKHLQCLEEELKPLEEALNLAPSKNFHLRPRDLISNINVIVLELKGSETTF | |
| G-GS-L5R | MCEYADETATIVEFLNRWITFSQSTISTLTGGGGSELCDDDPPEIPHATFKAM | |
| | AYKEGTMLNCECKRGFRRIKSGSLYMLCTGNSSHSSWDNQCQCTSSATRNTTK | |
| | QVTPQPEEQKERKTTEMQSPMQPVDQASLPGHCREPPPWENEATERIYHFVVG | |
| | QMVYYQCVQGYRALHRGPAESVCKMTHGKTRWTQPQLICTGE | |

P1523 Cleaved proteins (Partial TEV cleavage)

| | | |
|---|---|---|
| Chain 1: | EPKSSDKTHTCPPCPAPELLGGPSVFLFPPKPKDTLMISRTPEVTCVVVDVSH | 183 |
| Fc- | EDPEVKFNWYVDGVEVHNAKTKPREEQYNSTYRVVSVLTVLHQDWLNGKEYKC | |
| GSENLYFQ | KVSNKALPAPIEKTISKAKGQPREPQVYTLPPSREEMTKNQVSLTCLVKGFYP | |
| G-GS-L5R | SDIAVEWESNGQPENNYKTTPPVLDSDGSFFLYSKLTVDKSRWQQGNVFSCSV | |
| | MHEALHNHYTQKSLSLSPGKGSENLYFQGGSAPTSSSTKKTQLQLEHLLLDLQ | |
| | MILNGINNYKNPKLTRMLTFKFYMPKKATELKHLQCLEEELKPLEEALNLAPS | |
| | KNFHLRPRDLISNINVIVLELKGSETTFMCEYADETATIVEFLNRWITFSQST | |
| | ISTLTGGGGSELCDDDPPEIPHATFKAMAYKEGTMLNCECKRGFRRIKSGSLY | |
| | MLCTGNSSHSSWDNQCQCTSSATRNTTKQVTPQPEEQKERKTTEMQSPMQPVD | |
| | QASLPGHCREPPPWENEATERIYHFVVGQMVYYQCVQGYRALHRGPAESVCKM | |
| | THGKTRWTQPQLICTGE | |
| Chain 2: | EPKSSDKTHTCPPCPAPELLGGPSVFLFPPKPKDTLMISRTPEVTCVVVDVSH | 184 |
| Fc- | EDPEVKFNWYVDGVEVHNAKTKPREEQYNSTYRVVSVLTVLHQDWLNGKEYKC | |
| GSENLYFQ | KVSNKALPAPIEKTISKAKGQPREPQVYTLPPSREEMTKNQVSLTCLVKGFYP | |
| | SDIAVEWESNGQPENNYKTTPPVLDSDGSFFLYSKLTVDKSRWQQGNVFSCSV | |
| | MHEALHNHYTQKSLSLSPGKGSENLYFQ | |
| Chain 3: | GGSAPTSSSTKKTQLQLEHLLLDLQMILNGINNYKNPKLTRMLTFKFYMPKKA | 185 |
| G-GS-L5R | TELKHLQCLEEELKPLEEALNLAPSKNFHLRPRDLISNINVIVLELKGSETTF | |
| | MCEYADETATIVEFLNRWITFSQSTISTLTGGGGSELCDDDPPEIPHATFKAM | |
| | AYKEGTMLNCECKRGFRRIKSGSLYMLCTGNSSHSSWDNQCQCTSSATRNTTK | |
| | QVTPQPEEQKERKTTEMQSPMQPVDQASLPGHCREPPPWENEATERIYHFVVG | |
| | QMVYYQCVQGYRALHRGPAESVCKMTHGKTRWTQPQLICTGE | |

P1524 Activatable Proprotein

| | | |
|---|---|---|
| Chains 1 | APTSSSTKKTQLQLEHLLLDLQMILNGINNYKNPKLTRMLTFKFYMPKKATEL | 186 |
| and 2: | KHLQCLEEELKPLEEALNLAPSKNFHLRPRDLISNINVIVLELKGSETTFMCE | |
| L5R-GS- | YADETATIVEFLNRWITFSQSTISTLTGGGGSELCDDDPPEIPHATFKAMAYK | |
| TEV-Fc | EGTMLNCECKRGFRRIKSGSLYMLCTGNSSHSSWDNQCQCTSSATRNTTKQVT | |
| | PQPEEQKERKTTEMQSPMQPVDQASLPGHCREPPPWENEATERIYHFVVGQMV | |
| | YYQCVQGYRALHRGPAESVCKMTHGKTRWTQPQLICTGEGSENLYFQGEPKSS | |
| | DKTHTCPPCPAPELLGGPSVFLFPPKPKDTLMISRTPEVTCVVVDVSHEDPEV | |
| | KFNWYVDGVEVHNAKTKPREEQYNSTYRVVSVLTVLHQDWLNGKEYKCKVSNK | |
| | ALPAPIEKTISKAKGQPREPQVYTLPPSREEMTKNQVSLTCLVKGFYPSDIAV | |
| | EWESNGQPENNYKTTPPVLDSDGSFFLYSKLTVDKSRWQQGNVFSCSVMHEAL | |
| | HNHYTQKSLSLSPGK | |

P1525 Activatable Proprotein

| | | |
|---|---|---|
| Chains 1 | APTSSSTKKTQLQLEHLLLDLQMILNGINNYKNPKLTRMLTFKFYMPKKATEL | 187 |
| and 2: | KHLQCLEEELKPLEEALNLAPSKNFHLRPRDLISNINVIVLELKGSETTFMCE | |
| L10R- | YADETATIVEFLNRWITFSQSTISTLTGGGGSGGGGSELCDDDPPEIPHATFK | |
| GGGGS- | AMAYKEGTMLNCECKRGFRRIKSGSLYMLCTGNSSHSSWDNQCQCTSSATRNT | |
| his6 | TKQVTPQPEEQKERKTTEMQSPMQPVDQASLPGHCREPPPWENEATERIYHFV | |
| | VGQMVYYQCVQGYRALHRGPAESVCKMTHGKTRWTQPQLICTGEGGGGSHHHH | |
| | HH | |

P1526 Activatable Proprotein

| | | |
|---|---|---|
| Chains 1 | EPKSSDKTHTCPPCPAPELLGGPSVFLFPPKPKDTLMISRTPEVTCVVVDVSH | 188 |
| and 2: | EDPEVKFNWYVDGVEVHNAKTKPREEQYNSTYRVVSVLTVLHQDWLNGKEYKC | |
| Fc-GS- | KVSNKALPAPIEKTISKAKGQPREPQVYTLPPSREEMTKNQVSLTCLVKGFYP | |
| TEV-GS- | SDIAVEWESNGQPENNYKTTPPVLDSDGSFFLYSKLTVDKSRWQQGNVFSCSV | |
| L10R | MHEALHNHYTQKSLSLSPGKGSENLYFQGGSAPTSSSTKKTQLQLEHLLLDLQ | |
| | MILNGINNYKNPKLTRMLTFKFYMPKKATELKHLQCLEEELKPLEEALNLAPS | |
| | KNFHLRPRDLISNINVIVLELKGSETTFMCEYADETATIVEFLNRWITFSQST | |
| | ISTLTGGGGSGGGGSELCDDDPPEIPHATFKAMAYKEGTMLNCECKRGFRRIK | |
| | SGSLYMLCTGNSSHSSWDNQCQCTSSATRNTTKQVTPQPEEQKERKTTEMQSP | |
| | MQPVDQASLPGHCREPPPWENEATERIYHFVVGQMVYYQCVQGYRALHRGPAE | |
| | SVCKMTHGKTRWTQPQLICTGE | |

P1527 Activatable Proprotein

| | | |
|---|---|---|
| Chains 1 | APTSSSTKKTQLQLEHLLLDLQMILNGINNYKNPKLTRMLTFKFYMPKKATEL | 189 |
| and 2: | KHLQCLEEELKPLEEALNLAPSKNFHLRPRDLISNINVIVLELKGSETTFMCE | |
| L10R-GS- | YADETATIVEFLNRWITFSQSTISTLTGGGGSGGGGSELCDDDPPEIPHATFK | |
| TEV-Fc | AMAYKEGTMLNCECKRGFRRIKSGSLYMLCTGNSSHSSWDNQCQCTSSATRNT | |
| | TKQVTPQPEEQKERKTTEMQSPMQPVDQASLPGHCREPPPWENEATERIYHFV | |
| | VGQMVYYQCVQGYRALHRGPAESVCKMTHGKTRWTQPQLICTGEGSENLYFQG | |
| | EPKSSDKTHTCPPCPAPELLGGPSVFLFPPKPKDTLMISRTPEVTCVVVDVSH | |
| | EDPEVKFNWYVDGVEVHNAKTKPREEQYNSTYRVVSVLTVLHQDWLNGKEYKC | |
| | KVSNKALPAPIEKTISKAKGQPREPQVYTLPPSREEMTKNQVSLTCLVKGFYP | |
| | SDIAVEWESNGQPENNYKTTPPVLDSDGSFFLYSKLTVDKSRWQQGNVFSCSV | |
| | MHEALHNHYTQKSLSLSPGK | |

P1528 Activatable Proprotein

| | | |
|---|---|---|
| Chains 1 | ELCDDDPPEIPHATFKAMAYKEGTMLNCECKRGFRRIKSGSLYMLCTGNSSHS | 190 |
| and 2: | SWDNQCQCTSSATRNTTKQVTPQPEEQKERKTTEMQSPMQPVDQASLPGHCRE | |
| R5L- | PPPWENEATERIYHFVVGQMVYYQCVQGYRALHRGPAESVCKMTHGKTRWTQP | |
| GGGGS- | QLICTGEGGGGSAPTSSSTKKTQLQLEHLLLDLQMILNGINNYKNPKLTRMLT | |
| his6 | FKFYMPKKATELKHLQCLEEELKPLEEALNLAPSKNFHLRPRDLISNINVIVL | |
| | ELKGSETTFMCEYADETATIVEFLNRWITFSQSTISTLTGGGGSHHHHHH | |

P1529 Activatable Proprotein

| | | |
|---|---|---|
| Chains 1 | EPKSSDKTHTCPPCPAPELLGGPSVFLFPPKPKDTLMISRTPEVTCVVVDVSH | 191 |
| and 2: | EDPEVKFNWYVDGVEVHNAKTKPREEQYNSTYRVVSVLTVLHQDWLNGKEYKC | |
| Fc- | KVSNKALPAPIEKTISKAKGQPREPQVYTLPPSREEMTKNQVSLTCLVKGFYP | |
| GSTEV- | SDIAVEWESNGQPENNYKTTPPVLDSDGSFFLYSKLTVDKSRWQQGNVFSCSV | |
| GS-R5L | MHEALHNHYTQKSLSLSPGKGSENLYFQGGSELCDDDPPEIPHATFKAMAYKE | |
| | GTMLNCECKRGFRRIKSGSLYMLCTGNSSHSSWDNQCQCTSSATRNTTKQVTP | |
| | QPEEQKERKTTEMQSPMQPVDQASLPGHCREPPPWENEATERIYHFVVGQMVY | |
| | YQCVQGYRALHRGPAESVCKMTHGKTRWTQPQLICTGEGGGGSAPTSSSTKKT | |
| | QLQLEHLLLDLQMILNGINNYKNPKLTRMLTFKFYMPKKATELKHLQCLEEEL | |
| | KPLEEALNLAPSKNFHLRPRDLISNINVIVLELKGSETTFMCEYADETATIVE | |
| | FLNRWITFSQSTISTLT | |

P1530 Activatable Proprotein

| | | |
|---|---|---|
| Chains 1 | ELCDDDPPEIPHATFKAMAYKEGTMLNCECKRGFRRIKSGSLYMLCTGNSSHS | 192 |
| and 2: | SWDNQCQCTSSATRNTTKQVTPQPEEQKERKTTEMQSPMQPVDQASLPGHCRE | |
| R5L-GS- | PPPWENEATERIYHFVVGQMVYYQCVQGYRALHRGPAESVCKMTHGKTRWTQP | |
| TEV-Fc | QLICTGEGGGGSAPTSSSTKKTQLQLEHLLLDLQMILNGINNYKNPKLTRMLT | |
| | FKFYMPKKATELKHLQCLEEELKPLEEALNLAPSKNFHLRPRDLISNINVIVL | |
| | ELKGSETTFMCEYADETATIVEFLNRWITFSQSTISTLTGSENLYFQGEPKSS | |
| | DKTHTCPPCPAPELLGGPSVFLFPPKPKDTLMISRTPEVTCVVVDVSHEDPEV | |
| | KFNWYVDGVEVHNAKTKPREEQYNSTYRVVSVLTVLHQDWLNGKEYKCKVSNK | |
| | ALPAPIEKTISKAKGQPREPQVYTLPPSREEMTKNQVSLTCLVKGFYPSDIAV | |
| | EWESNGQPENNYKTTPPVLDSDGSFFLYSKLTVDKSRWQQGNVFSCSVMHEAL | |
| | HNHYTQKSLSLSPGK | |

P1531 Activatable Proprotein

| | | |
|---|---|---|
| Chains 1 | ELCDDDPPEIPHATFKAMAYKEGTMLNCECKRGFRRIKSGSLYMLCTGNSSHS | 193 |
| and 2: | SWDNQCQCTSSATRNTTKQVTPQPEEQKERKTTEMQSPMQPVDQASLPGHCRE | |
| R10L- | PPPWENEATERIYHFVVGQMVYYQCVQGYRALHRGPAESVCKMTHGKTRWTQP | |
| GGGGS- | QLICTGEGGGGSGGGGSAPTSSSTKKTQLQLEHLLLDLQMILNGINNYKNPKL | |
| his6 | TRMLTFKFYMPKKATELKHLQCLEEELKPLEEALNLAPSKNFHLRPRDLISNI | |
| | NVIVLELKGSETTFMCEYADETATIVEFLNRWITFSQSTISTLTGGGGSHHHH | |
| | HH | |

P1532 Activatable Proprotein

| | | |
|---|---|---|
| Chains 1 | EPKSSDKTHTCPPCPAPELLGGPSVFLFPPKPKDTLMISRTPEVTCVVVDVSH | 194 |
| and 2: | EDPEVKFNWYVDGVEVHNAKTKPREEQYNSTYRVVSVLTVLHQDWLNGKEYKC | |
| Fc-GS- | KVSNKALPAPIEKTISKAKGQPREPQVYTLPPSREEMTKNQVSLTCLVKGFYP | |
| TEV-GS- | SDIAVEWESNGQPENNYKTTPPVLDSDGSFFLYSKLTVDKSRWQQGNVFSCSV | |
| R10L | MHEALHNHYTQKSLSLSPGKGSENLYFQGGSELCDDDPPEIPHATFKAMAYKE | |
| | GTMLNCECKRGFRRIKSGSLYMLCTGNSSHSSWDNQCQCTSSATRNTTKQVTP | |
| | QPEEQKERKTTEMQSPMQPVDQASLPGHCREPPPWENEATERIYHFVVGQMVY | |
| | YQCVQGYRALHRGPAESVCKMTHGKTRWTQPQLICTGEGGGGSGGGGSAPTSS | |
| | STKKTQLQLEHLLLDLQMILNGINNYKNPKLTRMLTFKFYMPKKATELKHLQC | |
| | LEEELKPLEEALNLAPSKNFHLRPRDLISNINVIVLELKGSETTFMCEYADET | |
| | ATIVEFLNRWITFSQSTISTLT | |

P1533 Activatable Proprotein

| | | |
|---|---|---|
| Chains 1 | ELCDDDPPEIPHATFKAMAYKEGTMLNCECKRGFRRIKSGSLYMLCTGNSSHS | 195 |
| and 2: | SWDNQCQCTSSATRNTTKQVTPQPEEQKERKTTEMQSPMQPVDQASLPGHCRE | |
| R10L-GS- | PPPWENEATERIYHFVVGQMVYYQCVQGYRALHRGPAESVCKMTHGKTRWTQP | |
| TEV-Fc | QLICTGEGGGGSGGGGSAPTSSSTKKTQLQLEHLLLDLQMILNGINNYKNPKL | |
| | TRMLTFKFYMPKKATELKHLQCLEEELKPLEEALNLAPSKNFHLRPRDLISNI | |
| | NVIVLELKGSETTFMCEYADETATIVEFLNRWITFSQSTISTLTGSENLYFQG | |
| | EPKSSDKTHTCPPCPAPELLGGPSVFLFPPKPKDTLMISRTPEVTCVVVDVSH | |
| | EDPEVKFNWYVDGVEVHNAKTKPREEQYNSTYRVVSVLTVLHQDWLNGKEYKC | |
| | KVSNKALPAPIEKTISKAKGQPREPQVYTLPPSREEMTKNQVSLTCLVKGFYP | |
| | SDIAVEWESNGQPENNYKTTPPVLDSDGSFFLYSKLTVDKSRWQQGNVFSCSV | |
| | MHEALHNHYTQKSLSLSPGK | |

P1630 Activatable Proprotein

| | | |
|---|---|---|
| Chains 1 | APTSSSTKKTQLQLEHLLLDLQMILNGINNYKNPKLTRMLTFKFYMPKKATEL | 196 |
| and 2: | KHLQCLEEELKPLEEALNLAPSKNFHLRPRDLISNINVIVLELKGSETTFMCE | |
| IL-2-T3- | YADETATIVEFLNRWITFSQSTISTLTGSENLYFQGGSELCDDDPPEIPHATF | |
| GSENLYFQ | KAMAYKEGTMLNCECKRGFRRIKSGSLYMLCTGNSSHSSWDNQCQCTSSATRN | |
| GGS-IL- | TTKQVTPQPEEQKERKTTEMQSPMQPVDQASLPGHCREPPPWENEATERIYHF | |
| 2Rα- | VVGQMVYYQCVQGYRALHRGPAESVCKMTHGKTRWTQPQLICTGEGGGGSHHH | |
| GGGGSHHH | HHH | |
| HHH | | |

P1630 Cleaved proteins (Complete TEV cleavage)

| | | |
|---|---|---|
| Chain 1: | APTSSSTKKTQLQLEHLLLDLQMILNGINNYKNPKLTRMLTFKFYMPKKATEL | 197 |
| IL-2-T3- | KHLQCLEEELKPLEEALNLAPSKNFHLRPRDLISNINVIVLELKGSETTFMCE | |
| GSENLYFQ | YADETATIVEFLNRWITFSQSTISTLTGSENLYFQ | |
| Chain 2: | GGSELCDDDPPEIPHATFKAMAYKEGTMLNCECKRGFRRIKSGSLYMLCTGNS | 198 |
| GGS-IL- | SHSSWDNQCQCTSSATRNTTKQVTPQPEEQKERKTTEMQSPMQPVDQASLPGH | |
| 2Rα- | CREPPPWENEATERIYHFVVGQMVYYQCVQGYRALHRGPAESVCKMTHGKTRW | |
| GGGGSHHH | TQPQLICTGEGGGGSHHHHHH | |
| HHH | | |

P1630 Cleaved proteins (Partial TEV cleavage)

| | | |
|---|---|---|
| Chain 1: | APTSSSTKKTQLQLEHLLLDLQMILNGINNYKNPKLTRMLTFKFYMPKKATEL | 199 |
| IL-2-T3- | KHLQCLEEELKPLEEALNLAPSKNFHLRPRDLISNINVIVLELKGSETTFMCE | |
| GSENLYFQ | YADETATIVEFLNRWITFSQSTISTLTGSENLYFQGGSELCDDDPPEIPHATF | |
| GGS-IL- | KAMAYKEGTMLNCECKRGFRRIKSGSLYMLCTGNSSHSSWDNQCQCTSSATRN | |
| 2Rα- | TTKQVTPQPEEQKERKTTEMQSPMQPVDQASLPGHCREPPPWENEATERIYHF | |
| GGGGSHHH | VVGQMVYYQCVQGYRALHRGPAESVCKMTHGKTRWTQPQLICTGEGGGGSHHH | |
| HHH | HHH | |
| Chain 2: | APTSSSTKKTQLQLEHLLLDLQMILNGINNYKNPKLTRMLTFKFYMPKKATEL | 200 |
| IL-2-T3- | KHLQCLEEELKPLEEALNLAPSKNFHLRPRDLISNINVIVLELKGSETTFMCE | |
| GSENLYFQ | YADETATIVEFLNRWITFSQSTISTLTGSENLYFQ | |
| Chain 3: | GGSELCDDDPPEIPHATFKAMAYKEGTMLNCECKRGFRRIKSGSLYMLCTGNS | 201 |
| GGS-IL- | SHSSWDNQCQCTSSATRNTTKQVTPQPEEQKERKTTEMQSPMQPVDQASLPGH | |
| 2Rα- | CREPPPWENEATERIYHFVVGQMVYYQCVQGYRALHRGPAESVCKMTHGKTRW | |
| GGGGSHHH | TQPQLICTGEGGGGSHHHHHH | |
| HHH | | |

P1631 Activatable Proprotein

| | | |
|---|---|---|
| Chains 1 | EPKSSDKTHTCPPCPAPELLGGPSVFLFPPKPKDTLMISRTPEVTCVVVDVSH | 202 |
| and 2: | EDPEVKFNWYVDGVEVHNAKTKPREEQYNSTYRVVSVLTVLHQDWLNGKEYKC | |
| Fc- | KVSNKALPAPIEKTISKAKGQPREPQVYTLPPSREEMTKNQVSLTCLVKGFYP | |
| GGGGSGGG | SDIAVEWESNGQPENNYKTTPPVLDSDGSFFLYSKLTVDKSRWQQGNVFSCSV | |
| GS-IL-2- | MHEALHNHYTQKSLSLSPGKGGGGSGGGGSAPTSSSTKKTQLQLEHLLLDLQM | |
| T3- | ILNGINNYKNPKLTRMLTFKFYMPKKATELKHLQCLEEELKPLEEALNLAPSK | |
| GSENLYFQ | NFHLRPRDLISNINVIVLELKGSETTFMCEYADETATIVEFLNRWITFSQSTI | |
| GGS-IL- | STLTGSENLYFQGGSELCDDDPPEIPHATFKAMAYKEGTMLNCECKRGFRRIK | |
| 2Rα | SGSLYMLCTGNSSHSSWDNQCQCTSSATRNTTKQVTPQPEEQKERKTTEMQSP | |
| | MQPVDQASLPGHCREPPPWENEATERIYHFVVGQMVYYQCVQGYRALHRGPAE | |
| | SVCKMTHGKTRWTQPQLICTGE | |

P1632 Activatable Proprotein

| | | |
|---|---|---|
| Chains 1 | APTSSSTKKTQLQLEHLLLDLQMILNGINNYKNPKLTRMLTFKFYMPKKATEL | 203 |
| and 2: | KHLQCLEEELKPLEEALNLAPSKNFHLRPRDLISNINVIVLELKGSETTFMCE | |
| IL-2-T3- | YADETATIVEFLNRWITFSQSTISTLTGSENLYFQGGSELCDDDPPEIPHATF | |
| GSENLYFQ | KAMAYKEGTMLNCECKRGFRRIKSGSLYMLCTGNSSHSSWDNQCQCTSSATRN | |
| GGS-IL- | TTKQVTPQPEEQKERKTTEMQSPMQPVDQASLPGHCREPPPWENEATERIYHF | |
| 2Rα- | VVGQMVYYQCVQGYRALHRGPAESVCKMTHGKTRWTQPQLICTGEGGGGSGGG | |
| GGGGSGGG | GSEPKSSDKTHTCPPCPAPELLGGPSVFLFPPKPKDTLMISRTPEVTCVVVDV | |
| GS-Fc | SHEDPEVKFNWYVDGVEVHNAKTKPREEQYNSTYRVVSVLTVLHQDWLNGKEY | |
| | KCKVSNKALPAPIEKTISKAKGQPREPQVYTLPPSREEMTKNQVSLTCLVKGF | |
| | YPSDIAVEWESNGQPENNYKTTPPVLDSDGSFFLYSKLTVDKSRWQQGNVFSC | |
| | SVMHEALHNHYTQKSLSLSPGK | |

P1633 Activatable Proprotein

| | | |
|---|---|---|
| Chains 1 | ELCDDDPPEIPHATFKAMAYKEGTMLNCECKRGFRRIKSGSLYMLCTGNSSHS | 204 |
| and 2: | SWDNQCQCTSSATRNTTKQVTPQPEEQKERKTTEMQSPMQPVDQASLPGHCRE | |
| II-2Rα- | PPPWENEATERIYHFVVGQMVYYQCVQGYRALHRGPAESVCKMTHGKTRWTQP | |
| GSENLYFQ | QLICTGEGSENLYFQGGSAPTSSSTKKTQLQLEHLLLDLQMILNGINNYKNPK | |
| GGS-IL- | LTRMLTFKFYMPKKATELKHLQCLEEELKPLEEALNLAPSKNFHLRPRDLISN | |
| 2-T3- | INVIVLELKGSETTFMCEYADETATIVEFLNRWITFSQSTISTLTGGGGSHHH | |
| GGGGSHHH | HHH | |
| HHH | | |

P1634 Activatable Proprotein

| | | |
|---|---|---|
| Chains 1 | EPKSSDKTHTCPPCPAPELLGGPSVFLFPPKPKDTLMISRTPEVTCVVVDVSH | 205 |
| and 2: | EDPEVKFNWYVDGVEVHNAKTKPREEQYNSTYRVVSVLTVLHQDWLNGKEYKC | |
| Fc- | KVSNKALPAPIEKTISKAKGQPREPQVYTLPPSREEMTKNQVSLTCLVKGFYP | |
| GGGGSGGG | SDIAVEWESNGQPENNYKTTPPVLDSDGSFFLYSKLTVDKSRWQQGNVFSCSV | |
| GS-IL- | MHEALHNHYTQKSLSLSPGKGGGGSGGGGSELCDDDPPEIPHATFKAMAYKEG | |
| 2Rα- | TMLNCECKRGFRRIKSGSLYMLCTGNSSHSSWDNQCQCTSSATRNTTKQVTPQ | |
| GSENLYFQ | PEEQKERKTTEMQSPMQPVDQASLPGHCREPPPWENEATERIYHFVVGQMVYY | |
| GGS-IL- | QCVQGYRALHRGPAESVCKMTHGKTRWTQPQLICTGEGSENLYFQGGSAPTSS | |
| 2-T3 | STKKTQLQLEHLLLDLQMILNGINNYKNPKLTRMLTFKFYMPKKATELKHLQC | |
| | LEEELKPLEEALNLAPSKNFHLRPRDLISNINVIVLELKGSETTFMCEYADET | |
| | ATIVEFLNRWITFSQSTISTLT | |

P1635 Activatable Proprotein

| | | |
|---|---|---|
| Chains 1 | ELCDDDPPEIPHATFKAMAYKEGTMLNCECKRGFRRIKSGSLYMLCTGNSSHS | 206 |
| and 2: | SWDNQCQCTSSATRNTTKQVTPQPEEQKERKTTEMQSPMQPVDQASLPGHCRE | |
| IL-2Rα- | PPPWENEATERIYHFVVGQMVYYQCVQGYRALHRGPAESVCKMTHGKTRWTQP | |
| GSENLYFQ | QLICTGEGSENLYFQGGSAPTSSSTKKTQLQLEHLLLDLQMILNGINNYKNPK | |
| GGS-IL- | LTRMLTFKFYMPKKATELKHLQCLEEELKPLEEALNLAPSKNFHLRPRDLISN | |
| 2-T3- | INVIVLELKGSETTFMCEYADETATIVEFLNRWITFSQSTISTLTGGGGSGGG | |
| GGGGSGGG | GSEPKSSDKTHTCPPCPAPELLGGPSVFLFPPKPKDTLMISRTPEVTCVVVDV | |
| GS-Fc | SHEDPEVKFNWYVDGVEVHNAKTKPREEQYNSTYRVVSVLTVLHQDWLNGKEY | |
| | KCKVSNKALPAPIEKTISKAKGQPREPQVYTLPPSREEMTKNQVSLTCLVKGF | |
| | YPSDIAVEWESNGQPENNYKTTPPVLDSDGSFFLYSKLTVDKSRWQQGNVFSC | |
| | SVMHEALHNHYTQKSLSLSPGK | |

P1664 Activatable Proprotein

| | | |
|---|---|---|
| Chains 1 | APTSSSTKKTQLQLEHLLLDLQMILNGINNYKNPKLTRMLTFKFYMPKKATEL | 207 |
| and 2: | KHLQCLEEELKPLEEALNLAPSKNFHLRPRDLISNINVIVLELKGSETTFMCE | |
| IL-2-T3- | YADETATIVEFLNRWITFSQSTISTLTGSGSENLYFQGGSGSELCDDDPPEIP | |
| GSGSENLY | HATFKAMAYKEGTMLNCECKRGFRRIKSGSLYMLCTGNSSHSSWDNQCQCTSS | |
| FQGGSGS- | ATRNTTKQVTPQPEEQKERKTTEMQSPMQPVDQASLPGHCREPPPWENEATER | |
| IL-2Rα- | IYHFVVGQMVYYQCVQGYRALHRGPAESVCKMTHGKTRWTQPQLICTGEGGGG | |
| GGGGSHHH | SHHHHHH | |
| HHH | | |

P1665 Activatable Proprotein

| | | |
|---|---|---|
| Chains 1 | EPKSSDKTHTCPPCPAPELLGGPSVFLFPPKPKDTLMISRTPEVTCVVVDVSH | 208 |
| and 2: | EDPEVKFNWYVDGVEVHNAKTKPREEQYNSTYRVVSVLTVLHQDWLNGKEYKC | |
| Fc- | KVSNKALPAPIEKTISKAKGQPREPQVYTLPPSREEMTKNQVSLTCLVKGFYP | |
| GGGGSGGG | SDIAVEWESNGQPENNYKTTPPVLDSDGSFFLYSKLTVDKSRWQQGNVFSCSV | |
| GS-IL-2- | MHEALHNHYTQKSLSLSPGKGGGGSGGGGSAPTSSSTKKTQLQLEHLLLDLQM | |
| T3- | ILNGINNYKNPKLTRMLTFKFYMPKKATELKHLQCLEEELKPLEEALNLAPSK | |
| GSGSENLY | NFHLRPRDLISNINVIVLELKGSETTFMCEYADETATIVEFLNRWITFSQSTI | |
| FQGGSGS- | STLTGSGSENLYFQGGSGSELCDDDPPEIPHATFKAMAYKEGTMLNCECKRGF | |
| IL-2Rα | RRIKSGSLYMLCTGNSSHSSWDNQCQCTSSATRNTTKQVTPQPEEQKERKTTE | |
| | MQSPMQPVDQASLPGHCREPPPWENEATERIYHFVVGQMVYYQCVQGYRALHR | |
| | GPAESVCKMTHGKTRWTQPQLICTGE | |

P1666 Activatable Proprotein

| | | |
|---|---|---|
| Chains 1 | APTSSSTKKTQLQLEHLLLDLQMILNGINNYKNPKLTRMLTFKFYMPKKATEL | 209 |
| and 2: | KHLQCLEEELKPLEEALNLAPSKNFHLRPRDLISNINVIVLELKGSETTFMCE | |
| IL-2-T3- | YADETATIVEFLNRWITFSQSTISTLTGSGSENLYFQGGSGSELCDDDPPEIP | |
| GSGSENLY | HATFKAMAYKEGTMLNCECKRGFRRIKSGSLYMLCTGNSSHSSWDNQCQCTSS | |
| FQGGSGS- | ATRNTTKQVTPQPEEQKERKTTEMQSPMQPVDQASLPGHCREPPPWENEATER | |
| IL-2Rα- | IYHFVVGQMVYYQCVQGYRALHRGPAESVCKMTHGKTRWTQPQLICTGEGGGG | |
| GGGGSGGG | SGGGGSEPKSSDKTHTCPPCPAPELLGGPSVFLFPPKPKDTLMISRTPEVTCV | |
| GS-Fc | VVDVSHEDPEVKFNWYVDGVEVHNAKTKPREEQYNSTYRVVSVLTVLHQDWLN | |
| | GKEYKCKVSNKALPAPIEKTISKAKGQPREPQVYTLPPSREEMTKNQVSLTCL | |
| | VKGFYPSDIAVEWESNGQPENNYKTTPPVLDSDGSFFLYSKLTVDKSRWQQGN | |
| | VFSCSVMHEALHNHYTQKSLSLSPGK | |

P1667 Activatable Proprotein

| | | |
|---|---|---|
| Chains 1 | APTSSSTKKTQLQLEHLLLDLQMILNGINNYKNPKLTRMLTFKFYMPKKATEL | 210 |
| and 2: | KHLQCLEEELKPLEEALNLAPSKNFHLRPRDLISNINVIVLELKGSETTFMCE | |
| IL-2-T3- | YADETATIVEFLNRWITFSQSTISTLTGSGSGSENLYFQGGSGSGSELCDDDP | |
| GSGSGSEN | PEIPHATFKAMAYKEGTMLNCECKRGFRRIKSGSLYMLCTGNSSHSSWDNQCQ | |
| LYFQGGSG | CTSSATRNTTKQVTPQPEEQKERKTTEMQSPMQPVDQASLPGHCREPPPWENE | |
| SGS-IL- | ATERIYHFVVGQMVYYQCVQGYRALHRGPAESVCKMTHGKTRWTQPQLICTGE | |
| 2Rα- | GGGGSHHHHHH | |
| GGGGSHHH | | |
| HHH | | |

P1668 Activatable Proprotein

| | | |
|---|---|---|
| Chains 1 | EPKSSDKTHTCPPCPAPELLGGPSVFLFPPKPKDTLMISRTPEVTCVVVDVSH | 211 |
| and 2: | EDPEVKFNWYVDGVEVHNAKTKPREEQYNSTYRVVSVLTVLHQDWLNGKEYKC | |
| Fc- | KVSNKALPAPIEKTISKAKGQPREPQVYTLPPSREEMTKNQVSLTCLVKGFYP | |
| GGGGSGGG | SDIAVEWESNGQPENNYKTTPPVLDSDGSFFLYSKLTVDKSRWQQGNVFSCSV | |
| GS-IL-2- | MHEALHNHYTQKSLSLSPGKGGGGSGGGGSAPTSSSTKKTQLQLEHLLLDLQM | |
| T3- | ILNGINNYKNPKLTRMLTFKFYMPKKATELKHLQCLEEELKPLEEALNLAPSK | |
| GSGSGS3E | NFHLRPRDLISNINVIVLELKGSETTFMCEYADETATIVEFLNRWITFSQSTI | |
| NLYFQGGS | STLTGSGSGSENLYFQGGSGSGSELCDDDPPEIPHATFKAMAYKEGTMLNCEC | |
| GSGS-IL- | KRGFRRIKSGSLYMLCTGNSSHSSWDNQCQCTSSATRNTTKQVTPQPEEQKER | |
| 2Rα | KTTEMQSPMQPVDQASLPGHCREPPPWENEATERIYHFVVGQMVYYQCVQGYR | |
| | ALHRGPAESVCKMTHGKTRWTQPQLICTGE | |

P1669 Activatable Proprotein

| | | |
|---|---|---|
| Chains 1 | APTSSSTKKTQLQLEHLLLDLQMILNGINNYKNPKLTRMLTFKFYMPKKATEL | 212 |
| and 2: | KHLQCLEEELKPLEEALNLAPSKNFHLRPRDLISNINVIVLELKGSETTFMCE | |
| IL-2-T3- | YADETATIVEFLNRWITFSQSTISTLTGSGSGSENLYFQGGSGSGSELCDDDP | |
| GSGSGSEN | PEIPHATFKAMAYKEGTMLNCECKRGFRRIKSGSLYMLCTGNSSHSSWDNQCQ | |
| LYFQGGSG | CTSSATRNTTKQVTPQPEEQKERKTTEMQSPMQPVDQASLPGHCREPPPWENE | |
| SGS-IL- | ATERIYHFVVGQMVYYQCVQGYRALHRGPAESVCKMTHGKTRWTQPQLICTGE | |
| 2Rα- | GGGGSGGGGSEPKSSDKTHTCPPCPAPELLGGPSVFLFPPKPKDTLMISRTPE | |
| GGGGSGGG | VTCVVVDVSHEDPEVKFNWYVDGVEVHNAKTKPREEQYNSTYRVVSVLTVLHQ | |
| GS-Fc | DWLNGKEYKCKVSNKALPAPIEKTISKAKGQPREPQVYTLPPSREEMTKNQVS | |
| | LTCLVKGFYPSDIAVEWESNGQPENNYKTTPPVLDSDGSFFLYSKLTVDKSRW | |
| | QQGNVFSCSVMHEALHNHYTQKSLSLSPGK | |

P1719 Activatable Proprotein

| | | |
|---|---|---|
| Chains 1 | APASSSTKKTQLQLEHLLLDLQMILNGINNYKNPKLTRMLTFKFYMPKKATEL | 213 |
| and 2: | KHLQCLECELKPLEEVLNLAQSKNFHLRPRDLISNINVIVLELKGSETTFMCE | |
| L_T3A_E61C- | YADETATIVEFLNRWITFSQSIISTLTPLGLAGSGRSDNQGA | |
| PLGLAGSG | ELCDDDPPEIPHATFKAMAYKEGTMLNCECKRGFRRICSGSLYMLCTGNSSHS | |
| RSDNQGA- | SWDNQCQCTSSATRNTTKQVTPQPEEQKERKTTEMQSPMQPVDQASLPGHCRE | |
| R_K38C- | PPPWENEATERIYHFVVGQMVYYQCVQGYRALHRGPAESVCKMTHGKTRWTQP | |
| GGGGS- | QLICTGEGGGGSHHHHHH | |
| his6 | | |

P1719 Cleaved proteins (Complete uPA/Matriptase cleavage)

| | | |
|---|---|---|
| Chain 1: | APASSSTKKTQLQLEHLLLDLQMILNGINNYKNPKLTRMLTFKFYMPKKATEL | 214 |
| L_T3A_E61C- | KHLQCLECELKPLEEVLNLAQSKNFHLRPRDLISNINVIVLELKGSETTFMCE | |
| PLGLAGSG | YADETATIVEFLNRWITFSQSIISTLTPLGLAGSGR | |
| R | | |
| Chain 2: | SDNQGAELCDDDPPEIPHATFKAMAYKEGTMLNCECKRGFRRICSGSLYMLCT | 215 |
| SDNQGA- | GNSSHSSWDNQCQCTSSATRNTTKQVTPQPEEQKERKTTEMQSPMQPVDQASL | |
| R_K38C- | PGHCREPPPWENEATERIYHFVVGQMVYYQCVQGYRALHRGPAESVCKMTHGK | |
| GGGGS- | TRWTQPQLICTGEGGGGSHHHHHH | |
| his6 | | |

P1719 Cleaved proteins (Partial uPA/Matriptase cleavage)

| | | |
|---|---|---|
| Chain 1: | APASSSTKKTQLQLEHLLLDLQMILNGINNYKNPKLTRMLTFKFYMPKKATEL | 216 |
| L_T3A_E61C- | KHLQCLECELKPLEEVLNLAQSKNFHLRPRDLISNINVIVLELKGSETTFMCE | |
| PLGLAGSG | YADETATIVEFLNRWITFSQSIISTLTPLGLAGSGRSDNQGA | |
| RSDNQGA- | ELCDDDPPEIPHATFKAMAYKEGTMLNCECKRGFRRICSGSLYMLCTGNSSHS | |
| R_K38C- | SWDNQCQCTSSATRNTTKQVTPQPEEQKERKTTEMQSPMQPVDQASLPGHCRE | |
| GGGGS- | PPPWENEATERIYHFVVGQMVYYQCVQGYRALHRGPAESVCKMTHGKTRWTQP | |
| his6 | QLICTGEGGGGSHHHHHH | |
| Chain 2: | APASSSTKKTQLQLEHLLLDLQMILNGINNYKNPKLTRMLTFKFYMPKKATEL | 217 |
| L_T3A_E61C- | KHLQCLECELKPLEEVLNLAQSKNFHLRPRDLISNINVIVLELKGSETTFMCE | |
| PLGLAGSG | YADETATIVEFLNRWITFSQSIISTLTPLGLAGSGR | |
| R | | |
| Chain 3: | SDNQGAELCDDDPPEIPHATFKAMAYKEGTMLNCECKRGFRRICSGSLYMLCT | 218 |
| SDNQGA- | GNSSHSSWDNQCQCTSSATRNTTKQVTPQPEEQKERKTTEMQSPMQPVDQASL | |
| R_K38C- | PGHCREPPPWENEATERIYHFVVGQMVYYQCVQGYRALHRGPAESVCKMTHGK | |
| GGGGS- | TRWTQPQLICTGEGGGGSHHHHHH | |
| his6 | | |

P1719 Cleaved proteins (Complete MMP-2/MMP-9 cleavage)

| | | |
|---|---|---|
| Chain 1: | APASSSTKKTQLQLEHLLLDLQMILNGINNYKNPKLTRMLTFKFYMPKKATEL | 219 |
| L_T3A_E61C- | KHLQCLECELKPLEEVLNLAQSKNFHLRPRDLISNINVIVLELKGSETTFMCE | |
| PLG | YADETATIVEFLNRWITFSQSIISTLTPLG | |
| Chain 2: | LAGSGRSDNQGAELCDDDPPEIPHATFKAMAYKEGTMLNCECKRGFRRICSGS | 220 |
| LAGSGRSD | LYMLCTGNSSHSSWDNQCQCTSSATRNTTKQVTPQPEEQKERKTTEMQSPMQP | |
| NQGA- | VDQASLPGHCREPPPWENEATERIYHFVVGQMVYYQCVQGYRALHRGPAESVC | |
| R_K38C- | KMTHGKTRWTQPQLICTGEGGGGSHHHHHH | |
| GGGGS- | | |
| his6 | | |

P1719 Cleaved proteins (Partial MMP-2/MMP-9 cleavage)

| | | |
|---|---|---|
| Chain 1: | APASSSTKKTQLQLEHLLLDLQMILNGINNYKNPKLTRMLTFKFYMPKKATEL | 221 |
| L_T3A_E61C- | KHLQCLECELKPLEEVLNLAQSKNFHLRPRDLISNINVIVLELKGSETTFMCE | |
| PLGLAGSG | YADETATIVEFLNRWITFSQSIISTLTPLGLAGSGRSDNQGA | |
| RSDNQGA- | ELCDDDPPEIPHATFKAMAYKEGTMLNCECKRGFRRICSGSLYMLCTGNSSHS | |
| R_K38C- | SWDNQCQCTSSATRNTTKQVTPQPEEQKERKTTEMQSPMQPVDQASLPGHCRE | |
| GGGGS- | PPPWENEATERIYHFVVGQMVYYQCVQGYRALHRGPAESVCKMTHGKTRWTQP | |
| his6 | QLICTGEGGGGSHHHHHH | |
| Chain 2: | APASSSTKKTQLQLEHLLLDLQMILNGINNYKNPKLTRMLTFKFYMPKKATEL | 222 |
| L_T3A_E61C- | KHLQCLECELKPLEEVLNLAQSKNFHLRPRDLISNINVIVLELKGSETTFMCE | |
| PLG | YADETATIVEFLNRWITFSQSIISTLT | |
| | PLG | |
| Chain 3: | LAGSGRSDNQGA | 223 |
| LAGSGRSD | ELCDDDPPEIPHATFKAMAYKEGTMLNCECKRGFRRICSGSLYMLCTGNSSHS | |
| NQGA- | SWDNQCQCTSSATRNTTKQVTPQPEEQKERKTTEMQSPMQPVDQASLPGHCRE | |
| R_K38C- | PPPWENEATERIYHFVVGQMVYYQCVQGYRALHRGPAESVCKMTHGKTRWTQP | |
| GGGGS- | QLICTGE | |
| his6 | GGGGSHHHHHH | |

P1719 Cleaved proteins (Complete Legumain cleavage)

| | | |
|---|---|---|
| Chain 1: | APASSSTKKTQLQLEHLLLDLQMILNGINNYKNPKLTRMLTFKFYMPKKATEL | 224 |
| L_T3A_E61C- | KHLQCLECELKPLEEVLNLAQSKNFHLRPRDLISNINVIVLELKGSETTFMCE | |
| PLGLAGSG | YADETATIVEFLNRWITFSQSIISTLTPLGLAGSGRSDN | |
| RSDN | | |
| Chain 2: | QGAELCDDDPPEIPHATFKAMAYKEGTMLNCECKRGFRRICSGSLYMLCTGNS | 225 |
| QGA- | SHSSWDNQCQCTSSATRNTTKQVTPQPEEQKERKTTEMQSPMQPVDQASLPGH | |
| R_K38C- | CREPPPWENEATERIYHFVVGQMVYYQCVQGYRALHRGPAESVCKMTHGKTRW | |
| GGGGS- | TQPQLICTGEGGGGSHHHHHH | |
| his6 | | |

P1719 Cleaved proteins (Partial Legumain cleavage)

| | | |
|---|---|---|
| Chain 1: | APASSSTKKTQLQLEHLLLDLQMILNGINNYKNPKLTRMLTFKFYMPKKATEL | 226 |
| L_T3A_E61C- | KHLQCLECELKPLEEVLNLAQSKNFHLRPRDLISNINVIVLELKGSETTFMCE | |
| PLGLAGSG | YADETATIVEFLNRWITFSQSIISTLTPLGLAGSGRSDNQGA | |
| RSDNQGA- | ELCDDDPPEIPHATFKAMAYKEGTMLNCECKRGFRRICSGSLYMLCTGNSSHS | |
| R_K38C- | SWDNQCQCTSSATRNTTKQVTPQPEEQKERKTTEMQSPMQPVDQASLPGHCRE | |
| GGGGS- | PPPWENEATERIYHFVVGQMVYYQCVQGYRALHRGPAESVCKMTHGKTRWTQP | |
| his6 | QLICTGEGGGGSHHHHHH | |
| Chain 2: | APASSSTKKTQLQLEHLLLDLQMILNGINNYKNPKLTRMLTFKFYMPKKATEL | 227 |
| L_T3A_E61C- | KHLQCLECELKPLEEVLNLAQSKNFHLRPRDLISNINVIVLELKGSETTFMCE | |
| PLGLAGSG | YADETATIVEFLNRWITFSQSIISTLTPLGLAGSGRSDN | |
| RSDN | | |
| Chain 3: | QGAELCDDDPPEIPHATFKAMAYKEGTMLNCECKRGFRRICSGSLYMLCTGNS | 228 |
| QGA- | SHSSWDNQCQCTSSATRNTTKQVTPQPEEQKERKTTEMQSPMQPVDQASLPGH | |
| R_K38C- | CREPPPWENEATERIYHFVVGQMVYYQCVQGYRALHRGPAESVCKMTHGKTRW | |
| GGGGS- | TQPQLICTGEGGGGSHHHHHH | |
| his6 | | |

P1720 Activatable Proprotein

| | | |
|---|---|---|
| Chains 1 | EPKSSDKTHTCPPCPAPELLGGPSVFLFPPKPKDTLMISRTPEVTCVVVDVSH | 229 |
| and 2: | EDPEVKFNWYVDGVEVHNAKTKPREEQYNSTYRVVSVLTVLHQDWLNGKEYKC | |
| Fc_delK- | KVSNKALPAPIEKTISKAKGQPREPQVYTLPPSREEMTKNQVSLTCLVKGFYP | |
| stableLinker- | SDIAVEWESNGQPENNYKTTPPVLDSDGSFFLYSKLTVDKSRWQQGNVFSCSV | |
| L_T3A_E61C- | MHEALHNHYTQKSLSLSPGGGGGSGGGGSAPASSSTKKTQLQLEHLLLDLQMI | |
| GPLGLAGS | LNGINNYKNPKLTRMLTFKFYMPKKATELKHLQCLECELKPLEEVLNLAQSKN | |
| GRSDNQGA- | FHLRPRDLISNINVIVLELKGSETTFMCEYADETATIVEFLNRWITFSQSIIS | |
| R_K38C | TLTGPLGLAGSGRSDNQGAELCDDDPPEIPHATFKAMAYKEGTMLNCECKRGF | |
| | RRICSGSLYMLCTGNSSHSSWDNQCQCTSSATRNTTKQVTPQPEEQKERKTTE | |
| | MQSPMQPVDQASLPGHCREPPPWENEATERIYHFVVGQMVYYQCVQGYRALHR | |
| | GPAESVCKMTHGKTRWTQPQLICTGE | |

P1721 Activatable Proprotein

| | | |
|---|---|---|
| Chains 1 | APASSSTKKTQLQLEHLLLDLQMILNGINNYKNPKLTRMLTFKFYMPKKATEL | 230 |
| and 2: | KHLQCLECELKPLEEVLNLAQSKNFHLRPRDLISNINVIVLELKGSETTFMCE | |
| L_T3A_E61C- | YADETATIVEFLNRWITFSQSIISTLTPLGLAGSGRSDNQGA | |
| PLGLAGSG | ELCDDDPPEIPHATFKAMAYKEGTMLNCECKRGFRRICSGSLYMLCTGNSSHS | |
| RSDNQGA- | SWDNQCQCTSSATRNTTKQVTPQPEEQKERKTTEMQSPMQPVDQASLPGHCRE | |
| R_K38C- | PPPWENEATERIYHFVVGQMVYYQCVQGYRALHRGPAESVCKMTHGKTRWTQP | |
| stableLinker-Fc | QLICTGEGGGGSGGGGSEPKSSDKTHTCPPCPAPELLGGPSVFLFPPKPKDTL | |
| | MISRTPEVTCVVVDVSHEDPEVKFNWYVDGVEVHNAKTKPREEQYNSTYRVVS | |
| | VLTVLHQDWLNGKEYKCKVSNKALPAPIEKTISKAKGQPREPQVYTLPPSREE | |
| | MTKNQVSLTCLVKGFYPSDIAVEWESNGQPENNYKTTPPVLDSDGSFFLYSKL | |
| | TVDKSRWQQGNVFSCSVMHEALHNHYTQKSLSLSPGK | |

P1722 Activatable Proprotein

| | | |
|---|---|---|
| Chains 1 | APASSSTKKTQLQLEHLLLDLQMILNGINNYKNPKLTRMLTFKFYMPKKATEL | 231 |
| and 2: | KHLQCLECELKPLEEVLNLAQSKNFHLRPRDLISNINVIVLELKGSETTFMCE | |
| L_T3A_E61C- | YADETATIVEFLNRWITFSQSIISTLTGPLGLAGSGRSDNQGAELCDDDPPEI | |
| GPLGLAGS | PHATFKAMAYKEGTMLNCECKRGFRRICSGSLYMLCTGNSSHSSWDNQCQCTS | |
| GRSDNQGA- | SATRNTTKQVTPQPEEQKERKTTEMQSPMQPVDQASLPGHCREPPPWENEATE | |
| R_K38C- | RIYHFVVGQMVYYQCVQGYRALHRGPAESVCKMTHGKTRWTQPQLICTGEGGG | |
| GGGGS- | GSHHHHHH | |
| his6 | | |

P1723 Activatable Proprotein

| | | |
|---|---|---|
| Chains 1 | EPKSSDKTHTCPPCPAPELLGGPSVFLFPPKPKDTLMISRTPEVTCVVVDVSH | 232 |
| and 2: | EDPEVKFNWYVDGVEVHNAKTKPREEQYNSTYRVVSVLTVLHQDWLNGKEYKC | |
| Fc_delK- | KVSNKALPAPIEKTISKAKGQPREPQVYTLPPSREEMTKNQVSLTCLVKGFYP | |
| stableLinker- | SDIAVEWESNGQPENNYKTTPPVLDSDGSFFLYSKLTVDKSRWQQGNVFSCSV | |
| L_T3A_E61C- | MHEALHNHYTQKSLSLSPGGGGGSGGGGSAPASSSTKKTQLQLEHLLLDLQMI | |
| GGPLGLAG | LNGINNYKNPKLTRMLTFKFYMPKKATELKHLQCLECELKPLEEVLNLAQSKN | |
| SGRSDNQG | FHLRPRDLISNINVIVLELKGSETTFMCEYADETATIVEFLNRWITFSQSIIS | |
| A-R_K38C | TLTGGPLGLAGSGRSDNQGAELCDDDPPEIPHATFKAMAYKEGTMLNCECKRG | |
| | FRRICSGSLYMLCTGNSSHSSWDNQCQCTSSATRNTTKQVTPQPEEQKERKTT | |
| | EMQSPMQPVDQASLPGHCREPPPWENEATERIYHFVVGQMVYYQCVQGYRALH | |
| | RGPAESVCKMTHGKTRWTQPQLICTGE | |

P1724 Activatable Proprotein

| | | |
|---|---|---|
| Chains 1 | APASSSTKKTQLQLEHLLLDLQMILNGINNYKNPKLTRMLTFKFYMPKKATEL | 233 |
| and 2: | KHLQCLECELKPLEEVLNLAQSKNFHLRPRDLISNINVIVLELKGSETTFMCE | |
| L_T3A_E61C- | YADETATIVEFLNRWITFSQSIISTLTGPLGLAGSGRSDNQGAELCDDDPPEI | |
| GPLGLAGS | PHATFKAMAYKEGTMLNCECKRGFRRICSGSLYMLCTGNSSHSSWDNQCQCTS | |
| GRSDNQGA- | SATRNTTKQVTPQPEEQKERKTTEMQSPMQPVDQASLPGHCREPPPWENEATE | |
| R_K38C- | RIYHFVVGQMVYYQCVQGYRALHRGPAESVCKMTHGKTRWTQPQLICTGEGGG | |
| stableLinker-Fc | GSGGGGSEPKSSDKTHTCPPCPAPELLGGPSVFLFPPKPKDTLMISRTPEVTC | |
| | VVVDVSHEDPEVKFNWYVDGVEVHNAKTKPREEQYNSTYRVVSVLTVLHQDWL | |
| | NGKEYKCKVSNKALPAPIEKTISKAKGQPREPQVYTLPPSREEMTKNQVSLTC | |
| | LVKGFYPSDIAVEWESNGQPENNYKTTPPVLDSDGSFFLYSKLTVDKSRWQQG | |
| | NVFSCSVMHEALHNHYTQKSLSLSPGK | |

P1725 Activatable Proprotein

| | | |
|---|---|---|
| Chains 1 | EPKSSDKTHTCPPCPAPELLGGPSVFLFPPKPKDTLMISRTPEVTCVVVDVSH | 234 |
| and 2: | EDPEVKFNWYVDGVEVHNAKTKPREEQYNSTYRVVSVLTVLHQDWLNGKEYKC | |
| Fc_delK- | KVSNKALPAPIEKTISKAKGQPREPQVYTLPPSREEMTKNQVSLTCLVKGFYP | |
| stableLinker- | SDIAVEWESNGQPENNYKTTPPVLDSDGSFFLYSKLTVDKSRWQQGNVFSCSV | |
| R- | MHEALHNHYTQKSLSLSPGGGGGSGGGGSELCDDDPPEIPHATFKAMAYKEGT | |
| PLGLAGSG | MLNCECKRGFRRIKSGSLYMLCTGNSSHSSWDNQCQCTSSATRNTTKQVTPQP | |
| RSDNQGA- | EEQKERKTTEMQSPMQPVDQASLPGHCREPPPWENEATERIYHFVVGQMVYYQ | |
| L | CVQGYRALHRGPAESVCKMTHGKTRWTQPQLICTGEPLGLAGSGRSDNQGAAP | |
| | TSSSTKKTQLQLEHLLLDLQMILNGINNYKNPKLTRMLTFKFYMPKKATELKH | |
| | LQCLEEELKPLEEVLNLAQSKNFHLRPRDLISNINVIVLELKGSETTFMCEYA | |
| | DETATIVEFLNRWITFSQSIISTLT | |

P1726 Activatable Proprotein

| | | |
|---|---|---|
| Chains 1 | EPKSSDKTHTCPPCPAPELLGGPSVFLFPPKPKDTLMISRTPEVTCVVVDVSH | 235 |
| and 2: | EDPEVKFNWYVDGVEVHNAKTKPREEQYNSTYRVVSVLTVLHQDWLNGKEYKC | |
| Fc_delK- | KVSNKALPAPIEKTISKAKGQPREPQVYTLPPSREEMTKNQVSLTCLVKGFYP | |
| stableLinker-R- | SDIAVEWESNGQPENNYKTTPPVLDSDGSFFLYSKLTVDKSRWQQGNVFSCSV | |
| PLGLAGSG | MHEALHNHYTQKSLSLSPGGGGGSGGGGSELCDDDPPEIPHATFKAMAYKEGT | |
| RSDNQGA- | MLNCECKRGFRRIKSGSLYMLCTGNSSHSSWDNQCQCTSSATRNTTKQVTPQP | |
| L_T3A | EEQKERKTTEMQSPMQPVDQASLPGHCREPPPWENEATERIYHFVVGQMVYYQ | |
| | CVQGYRALHRGPAESVCKMTHGKTRWTQPQLICTGEPLGLAGSGRSDNQGAAP | |
| | ASSSTKKTQLQLEHLLLDLQMILNGINNYKNPKLTRMLTFKFYMPKKATELKH | |
| | LQCLEEELKPLEEVLNLAQSKNFHLRPRDLISNINVIVLELKGSETTFMCEYA | |
| | DETATIVEFLNRWITFSQSIISTLT | |

P1727 Activatable Proprotein

| | | |
|---|---|---|
| Chains 1 | EPKSSDKTHTCPPCPAPELLGGPSVFLFPPKPKDTLMISRTPEVTCVVVDVSH | 236 |
| and 2: | EDPEVKFNWYVDGVEVHNAKTKPREEQYNSTYRVVSVLTVLHQDWLNGKEYKC | |
| Fc_delK- | KVSNKALPAPIEKTISKAKGQPREPQVYTLPPSREEMTKNQVSLTCLVKGFYP | |
| stableLinker- | SDIAVEWESNGQPENNYKTTPPVLDSDGSFFLYSKLTVDKSRWQQGNVFSCSV | |
| R_D04C- | MHEALHNHYTQKSLSLSPGGGGGSGGGGSELCCDDPPEIPHATFKAMAYKEGT | |
| PLGLAGSG | MLNCECKRGFRRIKSGSLYMLCTGNSSHSSWDNQCQCTSSATRNTTKQVTPQP | |
| RSDNQGA- | EEQKERKTTEMQSPMQPVDQASLPGHCREPPPWENEATERIYHFVVGQMVYYQ | |
| L_K35C_T3A | CVQGYRALHRGPAESVCKMTHGKTRWTQPQLICTGEPLGLAGSGRSDNQGAAP | |
| | ASSSTKKTQLQLEHLLLDLQMILNGINNYKNPCLTRMLTFKFYMPKKATELKH | |
| | LQCLEEELKPLEEVLNLAQSKNFHLRPRDLISNINVIVLELKGSETTFMCEYA | |
| | DETATIVEFLNRWITFSQSIISTLT | |

P1728 Activatable Proprotein

| | | |
|---|---|---|
| Chains 1 | EPKSSDKTHTCPPCPAPELLGGPSVFLFPPKPKDTLMISRTPEVTCVVVDVSH | 237 |
| and 2: | EDPEVKFNWYVDGVEVHNAKTKPREEQYNSTYRVVSVLTVLHQDWLNGKEYKC | |
| Fc_delK- | KVSNKALPAPIEKTISKAKGQPREPQVYTLPPSREEMTKNQVSLTCLVKGFYP | |
| stableLinker- | SDIAVEWESNGQPENNYKTTPPVLDSDGSFFLYSKLTVDKSRWQQGNVFSCSV | |
| R_H120C- | MHEALHNHYTQKSLSLSPGGGGGSGGGGSELCDDDPPEIPHATFKAMAYKEGT | |
| PLGLAGSG | MLNCECKRGFRRIKSGSLYMLCTGNSSHSSWDNQCQCTSSATRNTTKQVTPQP | |
| RSDNQGA- | EEQKERKTTEMQSPMQPVDQASLPGHCREPPPWENEATERIYCFVVGQMVYYQ | |
| L_R38C_T3A | CVQGYRALHRGPAESVCKMTHGKTRWTQPQLICTGEPLGLAGSGRSDNQGAAP | |
| | ASSSTKKTQLQLEHLLLDLQMILNGINNYKNPKLTCMLTFKFYMPKKATELKH | |
| | LQCLEEELKPLEEVLNLAQSKNFHLRPRDLISNINVIVLELKGSETTFMCEYA | |
| | DETATIVEFLNRWITFSQSIISTLT | |

P1729 Activatable Proprotein

| | | |
|---|---|---|
| Chains 1 | EPKSSDKTHTCPPCPAPELLGGPSVFLFPPKPKDTLMISRTPEVTCVVVDVSH | 238 |
| and 2: | EDPEVKFNWYVDGVEVHNAKTKPREEQYNSTYRVVSVLTVLHQDWLNGKEYKC | |
| Fc_delK- | KVSNKALPAPIEKTISKAKGQPREPQVYTLPPSREEMTKNQVSLTCLVKGFYP | |
| stableLinker- | SDIAVEWESNGQPENNYKTTPPVLDSDGSFFLYSKLTVDKSRWQQGNVFSCSV | |
| R_K38C- | MHEALHNHYTQKSLSLSPGGGGGSGGGGSELCDDDPPEIPHATFKAMAYKEGT | |
| PLGLAGSG | MLNCECKRGFRRICSGSLYMLCTGNSSHSSWDNQCQCTSSATRNTTKQVTPQP | |
| RSDNQGA- | EEQKERKTTEMQSPMQPVDQASLPGHCREPPPWENEATERIYHFVVGQMVYYQ | |
| L_E61C_T3A | CVQGYRALHRGPAESVCKMTHGKTRWTQPQLICTGEPLGLAGSGRSDNQGAAP | |
| | ASSSTKKTQLQLEHLLLDLQMILNGINNYKNPKLTRMLTFKFYMPKKATELKH | |
| | LQCLECELKPLEEVLNLAQSKNFHLRPRDLISNINVIVLELKGSETTFMCEYA | |
| | DETATIVEFLNRWITFSQSIISTLT | |

P1730 Activatable Proprotein

| | | |
|---|---|---|
| Chains 1 | EPKSSDKTHTCPPCPAPELLGGPSVFLFPPKPKDTLMISRTPEVTCVVVDVSH | 239 |
| and 2: | EDPEVKFNWYVDGVEVHNAKTKPREEQYNSTYRVVSVLTVLHQDWLNGKEYKC | |
| Fc_delK- | KVSNKALPAPIEKTISKAKGQPREPQVYTLPPSREEMTKNQVSLTCLVKGFYP | |
| stableLinker- | SDIAVEWESNGQPENNYKTTPPVLDSDGSFFLYSKLTVDKSRWQQGNVFSCSV | |
| R_S39C- | MHEALHNHYTQKSLSLSPGGGGGSGGGGSELCDDDPPEIPHATFKAMAYKEGT | |
| PLGLAGSG | MLNCECKRGFRRIKCGSLYMLCTGNSSHSSWDNQCQCTSSATRNTTKQVTPQP | |
| RSDNQGA- | EEQKERKTTEMQSPMQPVDQASLPGHCREPPPWENEATERIYHFVVGQMVYYQ | |
| L_E61C_T3A | CVQGYRALHRGPAESVCKMTHGKTRWTQPQLICTGEPLGLAGSGRSDNQGAAP | |
| | ASSSTKKTQLQLEHLLLDLQMILNGINNYKNPKLTRMLTFKFYMPKKATELKH | |
| | LQCLECELKPLEEVLNLAQSKNFHLRPRDLISNINVIVLELKGSETTFMCEYA | |
| | DETATIVEFLNRWITFSQSIISTLT | |

P1773 Activatable Proprotein

| | | |
|---|---|---|
| Chains 1 | ELCDDDPPEIPHATFKAMAYKEGTMLNCECKRGFRRIKSGSLYMLCTGNSSHS | 240 |
| and 2: | SWDNQCQCTSSATRNTTKQVTPQPEEQKERKTTEMQSPMQPVDQASLPGHCRE | |
| R- | PPPWENEATERIYHFVVGQMVYYQCVQGYRALHRGPAESVCKMTHGKTRWTQP | |
| GSGSENLY | QLICTGEGSGSENLYFQGGSGSAPTSSSTKKTQLQLEHLLLDLQMILNGINNY | |
| FQGGSGS- | KNPKLTRMLTFKFYMPKKATELKHLQCLEEELKPLEEALNLAPSKNFHLRPRD | |
| L-GGGGS- | LISNINVIVLELKGSETTFMCEYADETATIVEFLNRWITFSQSTISTLTGGGG | |
| his6 | SHHHHHH | |

P1774 Activatable Proprotein

| | | |
|---|---|---|
| Chains 1 | EPKSSDKTHTCPPCPAPELLGGPSVFLFPPKPKDTLMISRTPEVTCVVVDVSH | 241 |
| and 2: | EDPEVKFNWYVDGVEVHNAKTKPREEQYNSTYRVVSVLTVLHQDWLNGKEYKC | |
| Fc- | KVSNKALPAPIEKTISKAKGQPREPQVYTLPPSREEMTKNQVSLTCLVKGFYP | |
| stable | SDIAVEWESNGQPENNYKTTPPVLDSDGSFFLYSKLTVDKSRWQQGNVFSCSV | |
| Linker- | MHEALHNHYTQKSLSLSPGKGGGGSGGGGSELCDDDPPEIPHATFKAMAYKEG | |
| R- | TMLNCECKRGFRRIKSGSLYMLCTGNSSHSSWDNQCQCTSSATRNTTKQVTPQ | |
| GSGSENLY | PEEQKERKTTEMQSPMQPVDQASLPGHCREPPPWENEATERIYHFVVGQMVYY | |
| FQGGSGS- | QCVQGYRALHRGPAESVCKMTHGKTRWTQPQLICTGEGSGSENLYFQGGSGSA | |
| L | PTSSSTKKTQLQLEHLLLDLQMILNGINNYKNPKLTRMLTFKFYMPKKATELK | |
| | HLQCLEEELKPLEEALNLAPSKNFHLRPRDLISNINVIVLELKGSETTFMCEY | |
| | ADETATIVEFLNRWITFSQSTISTLT | |

P1775 Activatable Proprotein

| | | |
|---|---|---|
| Chains 1 | ELCDDDPPEIPHATFKAMAYKEGTMLNCECKRGFRRIKSGSLYMLCTGNSSHS | 242 |
| and 2: | SWDNQCQCTSSATRNTTKQVTPQPEEQKERKTTEMQSPMQPVDQASLPGHCRE | |
| R- | PPPWENEATERIYHFVVGQMVYYQCVQGYRALHRGPAESVCKMTHGKTRWTQP | |
| GSGSENLY | QLICTGEGSGSENLYFQGGSGSAPTSSSTKKTQLQLEHLLLDLQMILNGINNY | |
| FQGGSGS- | KNPKLTRMLTFKFYMPKKATELKHLQCLEEELKPLEEALNLAPSKNFHLRPRD | |
| L-stable | LISNINVIVLELKGSETTFMCEYADETATIVEFLNRWITFSQSTISTLTGGGG | |
| Linker- | SGGGGSEPKSSDKTHTCPPCPAPELLGGPSVFLFPPKPKDTLMISRTPEVTCV | |
| Fc | VVDVSHEDPEVKFNWYVDGVEVHNAKTKPREEQYNSTYRVVSVLTVLHQDWLN | |
| | GKEYKCKVSNKALPAPIEKTISKAKGQPREPQVYTLPPSREEMTKNQVSLTCL | |
| | VKGFYPSDIAVEWESNGQPENNYKTTPPVLDSDGSFFLYSKLTVDKSRWQQGN | |
| | VFSCSVMHEALHNHYTQKSLSLSPGK | |

P1776 Activatable Proprotein

| | | |
|---|---|---|
| Chains 1 | ELCDDDPPEIPHATFKAMAYKEGTMLNCECKRGFRRIKSGSLYMLCTGNSSHS | 243 |
| and 2: | SWDNQCQCTSSATRNTTKQVTPQPEEQKERKTTEMQSPMQPVDQASLPGHCRE | |
| R- | PPPWENEATERIYHFVVGQMVYYQCVQGYRALHRGPAESVCKMTHGKTRWTQP | |
| GSGSGSEN | QLICTGEGSGSGSENLYFQGGSGSGSAPTSSSTKKTQLQLEHLLLDLQMILNG | |
| LYFQGGSG | INNYKNPKLTRMLTFKFYMPKKATELKHLQCLEEELKPLEEALNLAPSKNFHL | |
| SGS-L- | RPRDLISNINVIVLELKGSETTFMCEYADETATIVEFLNRWITFSQSTISTLT | |
| GGGGS- | GGGGSHHHHHH | |
| his6 | | |

P1777 Activatable Proprotein

| | | |
|---|---|---|
| Chains 1 | EPKSSDKTHTCPPCPAPELLGGPSVFLFPPKPKDTLMISRTPEVTCVVVDVSH | 244 |
| and 2: | EDPEVKFNWYVDGVEVHNAKTKPREEQYNSTYRVVSVLTVLHQDWLNGKEYKC | |
| Fc- | KVSNKALPAPIEKTISKAKGQPREPQVYTLPPSREEMTKNQVSLTCLVKGFYP | |
| stable | SDIAVEWESNGQPENNYKTTPPVLDSDGSFFLYSKLTVDKSRWQQGNVFSCSV | |
| Linker- | MHEALHNHYTQKSLSLSPGKGGGGSGGGGSELCDDDPPEIPHATFKAMAYKEG | |
| R- | TMLNCECKRGFRRIKSGSLYMLCTGNSSHSSWDNQCQCTSSATRNTTKQVTPQ | |
| GSGSGSEN | PEEQKERKTTEMQSPMQPVDQASLPGHCREPPPWENEATERIYHFVVGQMVYY | |
| LYFQGGSG | QCVQGYRALHRGPAESVCKMTHGKTRWTQPQLICTGEGSGSGSENLYFQGGSG | |
| SGS-L | SGSAPTSSSTKKTQLQLEHLLLDLQMILNGINNYKNPKLTRMLTFKFYMPKKA | |
| | TELKHLQCLEEELKPLEEALNLAPSKNFHLRPRDLISNINVIVLELKGSETTF | |
| | MCEYADETATIVEFLNRWITFSQSTISTLT | |

P1778 Activatable Proprotein

| | | |
|---|---|---|
| Chains 1 | ELCDDDPPEIPHATFKAMAYKEGTMLNCECKRGFRRIKSGSLYMLCTGNSSHS | 245 |
| and 2: | SWDNQCQCTSSATRNTTKQVTPQPEEQKERKTTEMQSPMQPVDQASLPGHCRE | |
| R- | PPPWENEATERIYHFVVGQMVYYQCVQGYRALHRGPAESVCKMTHGKTRWTQP | |
| GSGSGSEN | QLICTGEGSGSGSENLYFQGGSGSGSAPTSSSTKKTQLQLEHLLLDLQMILNG | |
| LYFQGGSG | INNYKNPKLTRMLTFKFYMPKKATELKHLQCLEEELKPLEEALNLAPSKNFHL | |
| SGS-L- | RPRDLISNINVIVLELKGSETTFMCEYADETATIVEFLNRWITFSQSTISTLT | |
| stable | GGGGSGGGGSEPKSSDKTHTCPPCPAPELLGGPSVFLFPPKPKDTLMISRTPE | |
| Linker- | VTCVVVDVSHEDPEVKFNWYVDGVEVHNAKTKPREEQYNSTYRVVSVLTVLHQ | |
| Fc | DWLNGKEYKCKVSNKALPAPIEKTISKAKGQPREPQVYTLPPSREEMTKNQVS | |
| (stable | LTCLVKGFYPSDIAVEWESNGQPENNYKTTPPVLDSDGSFFLYSKLTVDKSRW | |
| linker: | QQGNVFSCSVMHEALHNHYTQKSLSLSPGK | |
| GGGGSGGG | | |
| GSEPKSSD | | |
| KTHT) | | |

P1779 Activatable Proprotein

| | | |
|---|---|---|
| Chains 1 | APASSSTKKTQLQLEHLLLDLQMILNGINNYKNPKLTRMLTFKFYMPKKATEL | 246 |
| and 2: | KHLQCLEEELKPLEEALNLAPSKNFHLRPRDLISNINVIVLELKGSETTFMCE | |
| L_T3A- | YADETATIVEFLNRWITFSQSTISTLTGGSPLGLAGSGRSDNHGGAELCDDDP | |
| GGSPLGLA | PEIPHATFKAMAYKEGTMLNCECKRGFRRIKSGSLYMLCTGNSSHSSWDNQCQ | |
| GSGRSDNH | CTSSATRNTTKQVTPQPEEQKERKTTEMQSPMQPVDQASLPGHCREPPPWENE | |
| GGA-R- | ATERIYHFVVGQMVYYQCVQGYRALHRGPAESVCKMTHGKTRWTQPQLICTGE | |
| stableLinker- | GGGGSGGGGSEPKSSDKTHTCPPCPAPEAAGGPSVFLFPPKPKDTLMISRTPE | |
| Fc(IgG1 | VTCVVVDVSHEDPEVKFNWYVDGVEVHNAKTKPREEQYNSTYRVVSVLTVLHQ | |
| AAA) | DWLNGKEYKCKVSNKALAAPIEKTISKAKGQPREPQVYTLPPSRDELTKNQVS | |
| | LTCLVKGFYPSDIAVEWESNGQPENNYKTTPPVLDSDGSFFLYSKLTVDKSRW | |
| | QQGNVFSCSVMHEALHNHYTQKSLSLSPGK | |

P1779 Cleaved proteins (Complete uPA/Matriptase cleavage)

| | | |
|---|---|---|
| Chains 1 | APASSSTKKTQLQLEHLLLDLQMILNGINNYKNPKLTRMLTFKFYMPKKATEL | 247 |
| and 2: | KHLQCLEEELKPLEEALNLAPSKNFHLRPRDLISNINVIVLELKGSETTFMCE | |
| L_T3A- | YADETATIVEFLNRWITFSQSTISTLTGGSPLGLAGSGR | |
| GGSPLGLA | | |
| GSGR | | |
| Chains 3 | SDNHGGAELCDDDPPEIPHATFKAMAYKEGTMLNCECKRGFRRIKSGSLYMLC | 248 |
| and 4: | TGNSSHSSWDNQCQCTSSATRNTTKQVTPQPEEQKERKTTEMQSPMQPVDQAS | |
| SDNHGGA- | LPGHCREPPPWENEATERIYHFVVGQMVYYQCVQGYRALHRGPAESVCKMTHG | |
| R-stable | KTRWTQPQLICTGEGGGGSGGGGSEPKSSDKTHTCPPCPAPEAAGGPSVFLFP | |
| Linker- | PKPKDTLMISRTPEVTCVVVDVSHEDPEVKFNWYVDGVEVHNAKTKPREEQYN | |
| Fc | STYRVVSVLTVLHQDWLNGKEYKCKVSNKALAAPIEKTISKAKGQPREPQVYT | |
| | LPPSRDELTKNQVSLTCLVKGFYPSDIAVEWESNGQPENNYKTTPPVLDSDGS | |
| | FFLYSKLTVDKSRWQQGNVFSCSVMHEALHNHYTQKSLSLSPGK | |

P1779 Cleaved proteins (Partial uPA/Matriptase cleavage)

| | | |
|---|---|---|
| Chain 1: | APASSSTKKTQLQLEHLLLDLQMILNGINNYKNPKLTRMLTFKFYMPKKATEL | 249 |
| L_T3A- | KHLQCLEEELKPLEEALNLAPSKNFHLRPRDLISNINVIVLELKGSETTFMCE | |
| GGSPLGLA | YADETATIVEFLNRWITFSQSTISTLTGGSPLGLAGSGRSDNHGGAELCDDDP | |
| GSGRSDNH | PEIPHATFKAMAYKEGTMLNCECKRGFRRIKSGSLYMLCTGNSSHSSWDNQCQ | |
| GGA-R- | CTSSATRNTTKQVTPQPEEQKERKTTEMQSPMQPVDQASLPGHCREPPPWENE | |
| stableLinker-Fc | ATERIYHFVVGQMVYYQCVQGYRALHRGPAESVCKMTHGKTRWTQPQLICTGE | |
| | GGGGSGGGGSEPKSSDKTHTCPPCPAPEAAGGPSVFLFPPKPKDTLMISRTPE | |
| | VTCVVVDVSHEDPEVKFNWYVDGVEVHNAKTKPREEQYNSTYRVVSVLTVLHQ | |
| | DWLNGKEYKCKVSNKALAAPIEKTISKAKGQPREPQVYTLPPSRDELTKNQVS | |
| | LTCLVKGFYPSDIAVEWESNGQPENNYKTTPPVLDSDGSFFLYSKLTVDKSRW | |
| | QQGNVFSCSVMHEALHNHYTQKSLSLSPGK | |
| Chain 2: | APASSSTKKTQLQLEHLLLDLQMILNGINNYKNPKLTRMLTFKFYMPKKATEL | 250 |
| L_T3A- | KHLQCLEEELKPLEEALNLAPSKNFHLRPRDLISNINVIVLELKGSETTFMCE | |
| GGSPLGLA | YADETATIVEFLNRWITFSQSTISTLTGGSPLGLAGSGR | |
| GSGR | | |
| Chain 3: | SDNHGGAELCDDDPPEIPHATFKAMAYKEGTMLNCECKRGFRRIKSGSLYMLC | 251 |
| SDNHGGA- | TGNSSHSSWDNQCQCTSSATRNTTKQVTPQPEEQKERKTTEMQSPMQPVDQAS | |
| R-stable | LPGHCREPPPWENEATERIYHFVVGQMVYYQCVQGYRALHRGPAESVCKMTHG | |
| Linker- | KTRWTQPQLICTGEGGGGSGGGGSEPKSSDKTHTCPPCPAPEAAGGPSVFLFP | |
| Fc | PKPKDTLMISRTPEVTCVVVDVSHEDPEVKFNWYVDGVEVHNAKTKPREEQYN | |
| | STYRVVSVLTVLHQDWLNGKEYKCKVSNKALAAPIEKTISKAKGQPREPQVYT | |
| | LPPSRDELTKNQVSLTCLVKGFYPSDIAVEWESNGQPENNYKTTPPVLDSDGS | |
| | FFLYSKLTVDKSRWQQGNVFSCSVMHEALHNHYTQKSLSLSPGK | |

P1779 Cleaved proteins (Complete MMP-2/MMP-9 cleavage)

| | | |
|---|---|---|
| Chains 1 | APASSSTKKTQLQLEHLLLDLQMILNGINNYKNPKLTRMLTFKFYMPKKATEL | 252 |
| and 2: | KHLQCLEEELKPLEEALNLAPSKNFHLRPRDLISNINVIVLELKGSETTFMCE | |
| L_T3A- | YADETATIVEFLNRWITFSQSTISTLTGGSPLG | |
| GGSPLG | | |
| Chains 3 | LAGSGRSDNHGGAELCDDDPPEIPHATFKAMAYKEGTMLNCECKRGFRRIKSG | 253 |
| and 4: | SLYMLCTGNSSHSSWDNQCQCTSSATRNTTKQVTPQPEEQKERKTTEMQSPMQ | |
| LAGSGRSD | PVDQASLPGHCREPPPWENEATERIYHFVVGQMVYYQCVQGYRALHRGPAESV | |
| NHGGA-R- | CKMTHGKTRWTQPQLICTGEGGGGSGGGGSEPKSSDKTHTCPPCPAPEAAGGP | |
| stable | SVFLFPPKPKDTLMISRTPEVTCVVVDVSHEDPEVKFNWYVDGVEVHNAKTKP | |
| Linker- | REEQYNSTYRVVSVLTVLHQDWLNGKEYKCKVSNKALAAPIEKTISKAKGQPR | |
| Fc | EPQVYTLPPSRDELTKNQVSLTCLVKGFYPSDIAVEWESNGQPENNYKTTPPV | |
| | LDSDGSFFLYSKLTVDKSRWQQGNVFSCSVMHEALHNHYTQKSLSLSPGK | |

P1779 Cleaved proteins (Partial MMP-2/MMP-9 cleavage)

| | | |
|---|---|---|
| Chain 1: | APASSSTKKTQLQLEHLLLDLQMILNGINNYKNPKLTRMLTFKFYMPKKATEL | 254 |
| L_T3A- | KHLQCLEEELKPLEEALNLAPSKNFHLRPRDLISNINVIVLELKGSETTFMCE | |
| GGSPLGLA | YADETATIVEFLNRWITFSQSTISTLTGGSPLGLAGSGRSDNHGGAELCDDDP | |
| GSGRSDNH | PEIPHATFKAMAYKEGTMLNCECKRGFRRIKSGSLYMLCTGNSSHSSWDNQCQ | |
| GGA-R- | CTSSATRNTTKQVTPQPEEQKERKTTEMQSPMQPVDQASLPGHCREPPPWENE | |
| stableLinker-Fc | ATERIYHFVVGQMVYYQCVQGYRALHRGPAESVCKMTHGKTRWTQPQLICTGE | |
| | GGGGSGGGGSEPKSSDKTHTCPPCPAPEAAGGPSVFLFPPKPKDTLMISRTPE | |
| | VTCVVVDVSHEDPEVKFNWYVDGVEVHNAKTKPREEQYNSTYRVVSVLTVLHQ | |
| | DWLNGKEYKCKVSNKALAAPIEKTISKAKGQPREPQVYTLPPSRDELTKNQVS | |
| | LTCLVKGFYPSDIAVEWESNGQPENNYKTTPPVLDSDGSFFLYSKLTVDKSRW | |
| | QQGNVFSCSVMHEALHNHYTQKSLSLSPGK | |
| Chain 2: | APASSSTKKTQLQLEHLLLDLQMILNGINNYKNPKLTRMLTFKFYMPKKATEL | 255 |
| L_T3A- | KHLQCLEEELKPLEEALNLAPSKNFHLRPRDLISNINVIVLELKGSETTFMCE | |
| GGSPLG | YADETATIVEFLNRWITFSQSTISTLTGGSPLG | |
| Chain 3: | LAGSGRSDNHGGAELCDDDPPEIPHATFKAMAYKEGTMLNCECKRGFRRIKSG | 256 |
| LAGSGRSD | SLYMLCTGNSSHSSWDNQCQCTSSATRNTTKQVTPQPEEQKERKTTEMQSPMQ | |
| NHGGA-R- | PVDQASLPGHCREPPPWENEATERIYHFVVGQMVYYQCVQGYRALHRGPAESV | |
| stable | CKMTHGKTRWTQPQLICTGEGGGGSGGGGSEPKSSDKTHTCPPCPAPEAAGGP | |
| Linker- | SVFLFPPKPKDTLMISRTPEVTCVVVDVSHEDPEVKFNWYVDGVEVHNAKTKP | |
| Fc | REEQYNSTYRVVSVLTVLHQDWLNGKEYKCKVSNKALAAPIEKTISKAKGQPR | |
| | EPQVYTLPPSRDELTKNQVSLTCLVKGFYPSDIAVEWESNGQPENNYKTTPPV | |
| | LDSDGSFFLYSKLTVDKSRWQQGNVFSCSVMHEALHNHYTQKSLSLSPGK | |

P1779 Cleaved proteins (Complete Legumain cleavage)

| | | |
|---|---|---|
| Chains 1 | APASSSTKKTQLQLEHLLLDLQMILNGINNYKNPKLTRMLTFKFYMPKKATEL | 257 |
| and 2: | KHLQCLEEELKPLEEALNLAPSKNFHLRPRDLISNINVIVLELKGSETTFMCE | |
| L_T3A- | YADETATIVEFLNRWITFSQSTISTLTGGSPLGLAGSGRSDN | |
| GGSPLGLA | | |
| GSGRSDN | | |
| Chains 3 | HGGAELCDDDPPEIPHATFKAMAYKEGTMLNCECKRGFRRIKSGSLYMLCTGN | 258 |
| and 4: | SSHSSWDNQCQCTSSATRNTTKQVTPQPEEQKERKTTEMQSPMQPVDQASLPG | |
| HGGA-R- | HCREPPPWENEATERIYHFVVGQMVYYQCVQGYRALHRGPAESVCKMTHGKTR | |
| stable | WTQPQLICTGEGGGGSGGGGSEPKSSDKTHTCPPCPAPEAAGGPSVFLFPPKP | |
| Linker- | KDTLMISRTPEVTCVVVDVSHEDPEVKFNWYVDGVEVHNAKTKPREEQYNSTY | |
| Fc | RVVSVLTVLHQDWLNGKEYKCKVSNKALAAPIEKTISKAKGQPREPQVYTLPP | |
| | SRDELTKNQVSLTCLVKGFYPSDIAVEWESNGQPENNYKTTPPVLDSDGSFFL | |
| | YSKLTVDKSRWQQGNVFSCSVMHEALHNHYTQKSLSLSPGK | |

P1779 Cleaved proteins (Partial Legumain cleavage)

| | | |
|---|---|---|
| Chain 1: | APASSSTKKTQLQLEHLLLDLQMILNGINNYKNPKLTRMLTFKFYMPKKATEL | 259 |
| L_T3A- | KHLQCLEEELKPLEEALNLAPSKNFHLRPRDLISNINVIVLELKGSETTFMCE | |
| GGSPLGLA | YADETATIVEFLNRWITFSQSTISTLTGGSPLGLAGSGRSDNHGGAELCDDDP | |
| GSGRSDNH | PEIPHATFKAMAYKEGTMLNCECKRGFRRIKSGSLYMLCTGNSSHSSWDNQCQ | |
| GGA-R- | CTSSATRNTTKQVTPQPEEQKERKTTEMQSPMQPVDQASLPGHCREPPPWENE | |
| stableLinker-Fc | ATERIYHFVVGQMVYYQCVQGYRALHRGPAESVCKMTHGKTRWTQPQLICTGE | |
| | GGGGSGGGGSEPKSSDKTHTCPPCPAPEAAGGPSVFLFPPKPKDTLMISRTPE | |
| | VTCVVVDVSHEDPEVKFNWYVDGVEVHNAKTKPREEQYNSTYRVVSVLTVLHQ | |
| | DWLNGKEYKCKVSNKALAAPIEKTISKAKGQPREPQVYTLPPSRDELTKNQVS | |
| | LTCLVKGFYPSDIAVEWESNGQPENNYKTTPPVLDSDGSFFLYSKLTVDKSRW | |
| | QQGNVFSCSVMHEALHNHYTQKSLSLSPGK | |
| Chain 2: | APASSSTKKTQLQLEHLLLDLQMILNGINNYKNPKLTRMLTFKFYMPKKATEL | 260 |
| L_T3A- | KHLQCLEEELKPLEEALNLAPSKNFHLRPRDLISNINVIVLELKGSETTFMCE | |
| GGSPLGLA | YADETATIVEFLNRWITFSQSTISTLTGGSPLGLAGSGRSDN | |
| GSGRSDN | | |
| Chain 3: | HGGAELCDDDPPEIPHATFKAMAYKEGTMLNCECKRGFRRIKSGSLYMLCTGN | 261 |
| HGGA-R- | SSHSSWDNQCQCTSSATRNTTKQVTPQPEEQKERKTTEMQSPMQPVDQASLPG | |
| stable | HCREPPPWENEATERIYHFVVGQMVYYQCVQGYRALHRGPAESVCKMTHGKTR | |
| Linker- | WTQPQLICTGEGGGGSGGGGSEPKSSDKTHTCPPCPAPEAAGGPSVFLFPPKP | |
| Fc | KDTLMISRTPEVTCVVVDVSHEDPEVKFNWYVDGVEVHNAKTKPREEQYNSTY | |
| | RVVSVLTVLHQDWLNGKEYKCKVSNKALAAPIEKTISKAKGQPREPQVYTLPP | |
| | SRDELTKNQVSLTCLVKGFYPSDIAVEWESNGQPENNYKTTPPVLDSDGSFFL | |
| | YSKLTVDKSRWQQGNVFSCSVMHEALHNHYTQKSLSLSPGK | |

P1780 Activatable Proprotein

| | | |
|---|---|---|
| Chains 1 | APASSSTKKTQLQLEHLLLDLQMILNGINNYKNPKLTRMLTFKFYMPKKATEL | 262 |
| and 2: | KHLQCLEEELKPLEEALNLAPSKNFHLRPRDLISNINVIVLELKGSETTFMCE | |
| L_T3A- | YADETATIVEFLNRWITFSQSTISTLTGGSPLGLAGSGRSDNHGGAELCDDDP | |
| GGSPLGLA | PEIPHATFKAMAYKEGTMLNCECKRGFRRIKSGSLYMLCTGNSSHSSWDNQCQ | |
| GSGRSDNH | CTSSATRNTTKQVTPQPEEQKERKTTEMQSPMQPVDQASLPGHCREPPPWENE | |
| GGA-R- | ATERIYHFVVGQMVYYQCVQGYRALHRGPAESVCKMTHGKTRWTQPQLICTGE | |
| stableLinker- | GGSGGGGSEPKSSDKTHTCPPCPAPEAAGGPSVFLFPPKPKDTLMISRTPEVT | |
| Fc(IgG1_AAA) | CVVVDVSHEDPEVKFNWYVDGVEVHNAKTKPREEQYNSTYRVVSVLTVLHQDW | |
| | LNGKEYKCKVSNKALAAPIEKTISKAKGQPREPQVYTLPPSRDELTKNQVSLT | |
| | CLVKGFYPSDIAVEWESNGQPENNYKTTPPVLDSDGSFFLYSKLTVDKSRWQQ | |
| | GNVFSCSVMHEALHNHYTQKSLSLSPGK | |

P1781 Activatable Proprotein

| | | |
|---|---|---|
| Chains 1 | APASSSTKKTQLQLEHLLLDLQMILNGINNYKNPKLTRMLTFKFYMPKKATEL | 263 |
| and 2: | KHLQCLEEELKPLEEALNLAPSKNFHLRPRDLISNINVIVLELKGSETTFMCE | |
| L_T3A- | YADETATIVEFLNRWITFSQSTISTLTGGSPLGLAGSGRSDNHGGAELCDDDP | |
| GGSPLGLA | PEIPHATFKAMAYKEGTMLNCECKRGFRRIKSGSLYMLCTGNSSHSSWDNQCQ | |
| GSGRSDNH | CTSSATRNTTKQVTPQPEEQKERKTTEMQSPMQPVDQASLPGHCREPPPWENE | |
| GGA-R- | ATERIYHFVVGQMVYYQCVQGYRALHRGPAESVCKMTHGKTRWTQPQLICTGE | |
| stableLinker- | SGGGGSEPKSSDKTHTCPPCPAPEAAGGPSVFLFPPKPKDTLMISRTPEVTCV | |
| Fc(IgG1_AAA) | VVDVSHEDPEVKFNWYVDGVEVHNAKTKPREEQYNSTYRVVSVLTVLHQDWLN | |
| | GKEYKCKVSNKALAAPIEKTISKAKGQPREPQVYTLPPSRDELTKNQVSLTCL | |
| | VKGFYPSDIAVEWESNGQPENNYKTTPPVLDSDGSFFLYSKLTVDKSRWQQGN | |
| | VFSCSVMHEALHNHYTQKSLSLSPGK | |

P1782 Activatable Proprotein

| | | |
|---|---|---|
| Chains 1 | APASSSTKKTQLQLEHLLLDLQMILNGINNYKNPKLTRMLTFKFYMPKKATEL | 264 |
| and 2: | KHLQCLEEELKPLEEALNLAPSKNFHLRPRDLISNINVIVLELKGSETTFMCE | |
| L_T3A- | YADETATIVEFLNRWITFSQSTISTLTGGSPLGLAGSGRSDNHGGAELCDDDP | |
| GGSPLGLA | PEIPHATFKAMAYKEGTMLNCECKRGFRRIKSGSLYMLCTGNSSHSSWDNQCQ | |
| GSGRSDNH | CTSSATRNTTKQVTPQPEEQKERKTTEMQSPMQPVDQASLPGHCREPPPWENE | |
| GGA-R- | ATERIYHFVVGQMVYYQCVQGYRALHRGPAESVCKMTHGKTRWTQPQLICTGE | |
| stableLinker- | GGGSEPKSSDKTHTCPPCPAPEAAGGPSVFLFPPKPKDTLMISRTPEVTCVVV | |
| Fc(IgG1_AAA) | DVSHEDPEVKFNWYVDGVEVHNAKTKPREEQYNSTYRVVSVLTVLHQDWLNGK | |
| | EYKCKVSNKALAAPIEKTISKAKGQPREPQVYTLPPSRDELTKNQVSLTCLVK | |
| | GFYPSDIAVEWESNGQPENNYKTTPPVLDSDGSFFLYSKLTVDKSRWQQGNVF | |
| | SCSVMHEALHNHYTQKSLSLSPGK | |

P1783 Activatable Proprotein

| | | |
|---|---|---|
| Chains 1 | APASSSTKKTQLQLEHLLLDLQMILNGINNYKNPKLTRMLTFKFYMPKKATEL | 265 |
| and 2: | KHLQCLEEELKPLEEALNLAPSKNFHLRPRDLISNINVIVLELKGSETTFMCE | |
| L_T3A- | YADETATIVEFLNRWITFSQSTISTLTGGSPLGLAGSGRSDNQGGAELCDDDP | |
| GGSPLGLA | PEIPHATFKAMAYKEGTMLNCECKRGFRRIKSGSLYMLCTGNSSHSSWDNQCQ | |
| GSGRSDNQ | CTSSATRNTTKQVTPQPEEQKERKTTEMQSPMQPVDQASLPGHCREPPPWENE | |
| GGA-R- | ATERIYHFVVGQMVYYQCVQGYRALHRGPAESVCKMTHGKTRWTQPQLICTGE | |
| stableLinker- | GGGGSGGGGSEPKSSDKTHTCPPCPAPEAAGGPSVFLFPPKPKDTLMISRTPE | |
| Fc(IgG1_AAA) | VTCVVVDVSHEDPEVKFNWYVDGVEVHNAKTKPREEQYNSTYRVVSVLTVLHQ | |
| | DWLNGKEYKCKVSNKALAAPIEKTISKAKGQPREPQVYTLPPSRDELTKNQVS | |
| | LTCLVKGFYPSDIAVEWESNGQPENNYKTTPPVLDSDGSFFLYSKLTVDKSRW | |
| | QQGNVFSCSVMHEALHNHYTQKSLSLSPGK | |

P1784 Activatable Proprotein

| | | |
|---|---|---|
| Chains 1 | APASSSTKKTQLQLEHLLLDLQMILNGINNYKNPKLTRMLTFKFYMPKKATEL | 266 |
| and 2: | KHLQCLEEELKPLEEALNLAPSKNFHLRPRDLISNINVIVLELKGSETTFMCE | |
| L_T3A- | YADETATIVEFLNRWITFSQSTISTLTGGSPLGLAGSGRSDNRGGAELCDDDP | |
| GGSPLGLA | PEIPHATFKAMAYKEGTMLNCECKRGFRRIKSGSLYMLCTGNSSHSSWDNQCQ | |
| GSGRSDNR | CTSSATRNTTKQVTPQPEEQKERKTTEMQSPMQPVDQASLPGHCREPPPWENE | |
| GGA-R- | ATERIYHFVVGQMVYYQCVQGYRALHRGPAESVCKMTHGKTRWTQPQLICTGE | |
| stableLi | GGGGSGGGGSEPKSSDKTHTCPPCPAPEAAGGPSVFLFPPKPKDTLMISRTPE | |
| nker- | VTCVVVDVSHEDPEVKFNWYVDGVEVHNAKTKPREEQYNSTYRVVSVLTVLHQ | |
| Fc(IgG1 | DWLNGKEYKCKVSNKALAAPIEKTISKAKGQPREPQVYTLPPSRDELTKNQVS | |
| AAA) | LTCLVKGFYPSDIAVEWESNGQPENNYKTTPPVLDSDGSFFLYSKLTVDKSRW | |
| | QQGNVFSCSVMHEALHNHYTQKSLSLSPGK | |

P1785 Activatable Proprotein

| | | |
|---|---|---|
| Chains 1 | APASSSTKKTQLQLEHLLLDLQMILNGINNYKNPKLTRMLTFKFYMPKKATEL | 267 |
| and 2: | KHLQCLEEELKPLEEALNLAPSKNFHLRPRDLISNINVIVLELKGSETTFMCE | |
| L_T3A- | YADETATIVEFLNRWITFSQSTISTLTGGSPLGLAGSGRSDNTGGAELCDDDP | |
| GGSPLGLA | PEIPHATFKAMAYKEGTMLNCECKRGFRRIKSGSLYMLCTGNSSHSSWDNQCQ | |
| GSGRSDNT | CTSSATRNTTKQVTPQPEEQKERKTTEMQSPMQPVDQASLPGHCREPPPWENE | |
| GGA-R- | ATERIYHFVVGQMVYYQCVQGYRALHRGPAESVCKMTHGKTRWTQPQLICTGE | |
| stableLinker- | GGGGSGGGGSEPKSSDKTHTCPPCPAPEAAGGPSVFLFPPKPKDTLMISRTPE | |
| Fc(IgG1_AAA) | VTCVVVDVSHEDPEVKFNWYVDGVEVHNAKTKPREEQYNSTYRVVSVLTVLHQ | |
| | DWLNGKEYKCKVSNKALAAPIEKTISKAKGQPREPQVYTLPPSRDELTKNQVS | |
| | LTCLVKGFYPSDIAVEWESNGQPENNYKTTPPVLDSDGSFFLYSKLTVDKSRW | |
| | QQGNVFSCSVMHEALHNHYTQKSLSLSPGK | |

P1786 Activatable Proprotein

| | | |
|---|---|---|
| Chains 1 | APASSSTKKTQLQLEHLLLDLQMILNGINNYKNPKLTRMLTFKFYMPKKATEL | 268 |
| and 2: | KHLQCLEEELKPLEEALNLAPSKNFHLRPRDLISNINVIVLELKGSETTFMCE | |
| L_T3A- | YADETATIVEFLNRWITFSQSTISTLTGGSGGSGGSGGSGGSGGGAELCDDDP | |
| GGSGGSGG | PEIPHATFKAMAYKEGTMLNCECKRGFRRIKSGSLYMLCTGNSSHSSWDNQCQ | |
| SGGSGGSG | CTSSATRNTTKQVTPQPEEQKERKTTEMQSPMQPVDQASLPGHCREPPPWENE | |
| GGA-R- | ATERIYHFVVGQMVYYQCVQGYRALHRGPAESVCKMTHGKTRWTQPQLICTGE | |
| stableLinker- | GGGGSGGGGSEPKSSDKTHTCPPCPAPEAAGGPSVFLFPPKPKDTLMISRTPE | |
| Fc(IgG1_AAA) | VTCVVVDVSHEDPEVKFNWYVDGVEVHNAKTKPREEQYNSTYRVVSVLTVLHQ | |
| | DWLNGKEYKCKVSNKALAAPIEKTISKAKGQPREPQVYTLPPSRDELTKNQVS | |
| | LTCLVKGFYPSDIAVEWESNGQPENNYKTTPPVLDSDGSFFLYSKLTVDKSRW | |
| | QQGNVFSCSVMHEALHNHYTQKSLSLSPGK | |

P1834 Activatable Proprotein

| | | |
|---|---|---|
| Chains 1 | EPKSSDKTHTCPPCPAPEAAGGPSVFLFPPKPKDTLMISRTPEVTCVVVDVSH | 269 |
| and 2: | EDPEVKFNWYVDGVEVHNAKTKPREEQYNSTYRVVSVLTVLHQDWLNGKEYKC | |
| Fc(G1_AAA_C217S)_delK- | KVSNKALAAPIEKTISKAKGQPREPQVYTLPPSRDELTKNQVSLTCLVKGFYP | |
| GS- | SDIAVEWESNGQPENNYKTTPPVLDSDGSFFLYSKLTVDKSRWQQGNVFSCSV | |
| PLGLAG- | MHEALHNHYTQKSLSLSPGGSPLGLAGSAPASSSTKKTQLQLEHLLLDLQMIL | |
| S-L_T3A- | NGINNYKNPKLTRMLTFKFYMPKKATELKHLQCLEEELKPLEEALNLAPSKNF | |
| GGG- | HLRPRDLISNINVIVLELKGSETTFMCEYADETATIVEFLNRWITFSQSTIST | |
| SGRSDNH- | LTGGGSGRSDNHGGAELCDDDPPEIPHATFKAMAYKEGTMLNCECKRGFRRIK | |
| GGA-R | SGSLYMLCTGNSSHSSWDNQCQCTSSATRNTTKQVTPQPEEQKERKTTEMQSP | |
| 9/13 | MQPVDQASLPGHCREPPPWENEATERIYHFVVGQMVYYQCVQGYRALHRGPAE | |
| | SVCKMTHGKTRWTQPQLICTGE | |

P1834 Cleaved proteins (Complete uPA/Matriptase cleavage)

| | | |
|---|---|---|
| Chains 1 | EPKSSDKTHTCPPCPAPEAAGGPSVFLFPPKPKDTLMISRTPEVTCVVVDVSH | 270 |
| and 2: | EDPEVKFNWYVDGVEVHNAKTKPREEQYNSTYRVVSVLTVLHQDWLNGKEYKC | |
| Fc(G1_AAA_C217S)_delK- | KVSNKALAAPIEKTISKAKGQPREPQVYTLPPSRDELTKNQVSLTCLVKGFYP | |
| GS- | SDIAVEWESNGQPENNYKTTPPVLDSDGSFFLYSKLTVDKSRWQQGNVFSCSV | |
| PLGLAG- | MHEALHNHYTQKSLSLSPGGSPLGLAGSAPASSSTKKTQLQLEHLLLDLQMIL | |
| S-L_T3A- | NGINNYKNPKLTRMLTFKFYMPKKATELKHLQCLEEELKPLEEALNLAPSKNF | |
| GGG-SGR | HLRPRDLISNINVIVLELKGSETTFMCEYADETATIVEFLNRWITFSQSTIST | |
| | LTGGGSGR | |
| Chains 3 | SDNHGGAELCDDDPPEIPHATFKAMAYKEGTMLNCECKRGFRRIKSGSLYMLC | 271 |
| and 4: | TGNSSHSSWDNQCQCTSSATRNTTKQVTPQPEEQKERKTTEMQSPMQPVDQAS | |
| SDNH- | LPGHCREPPPWENEATERIYHFVVGQMVYYQCVQGYRALHRGPAESVCKMTHG | |
| GGA-R | KTRWTQPQLICTGE | |

P1834 Cleaved proteins (Partial uPA/Matriptase cleavage)

| | | |
|---|---|---|
| Chain 1: | EPKSSDKTHTCPPCPAPEAAGGPSVFLFPPKPKDTLMISRTPEVTCVVVDVSH | 272 |
| Fc(G1_AAA_C217S)_delK- | EDPEVKFNWYVDGVEVHNAKTKPREEQYNSTYRVVSVLTVLHQDWLNGKEYKC | |
| GS- | KVSNKALAAPIEKTISKAKGQPREPQVYTLPPSRDELTKNQVSLTCLVKGFYP | |
| PLGLAG- | SDIAVEWESNGQPENNYKTTPPVLDSDGSFFLYSKLTVDKSRWQQGNVFSCSV | |
| S-L_T3A- | MHEALHNHYTQKSLSLSPGGSPLGLAGSAPASSSTKKTQLQLEHLLLDLQMIL | |
| GGG- | NGINNYKNPKLTRMLTFKFYMPKKATELKHLQCLEEELKPLEEALNLAPSKNF | |
| SGRSDNH- | HLRPRDLISNINVIVLELKGSETTFMCEYADETATIVEFLNRWITFSQSTIST | |
| GGA-R | LTGGGSGRSDNHGGAELCDDDPPEIPHATFKAMAYKEGTMLNCECKRGFRRIK | |
| | SGSLYMLCTGNSSHSSWDNQCQCTSSATRNTTKQVTPQPEEQKERKTTEMQSP | |
| | MQPVDQASLPGHCREPPPWENEATERIYHFVVGQMVYYQCVQGYRALHRGPAE | |
| | SVCKMTHGKTRWTQPQLICTGE | |
| Chain 2: | EPKSSDKTHTCPPCPAPEAAGGPSVFLFPPKPKDTLMISRTPEVTCVVVDVSH | 273 |
| Fc(G1_AAA_C217S)_delK- | EDPEVKFNWYVDGVEVHNAKTKPREEQYNSTYRVVSVLTVLHQDWLNGKEYKC | |
| GS- | KVSNKALAAPIEKTISKAKGQPREPQVYTLPPSRDELTKNQVSLTCLVKGFYP | |
| PLGLAG- | SDIAVEWESNGQPENNYKTTPPVLDSDGSFFLYSKLTVDKSRWQQGNVFSCSV | |
| S-L_T3A- | MHEALHNHYTQKSLSLSPGGSPLGLAGSAPASSSTKKTQLQLEHLLLDLQMIL | |
| GGG-SGR | NGINNYKNPKLTRMLTFKFYMPKKATELKHLQCLEEELKPLEEALNLAPSKNF | |
| | HLRPRDLISNINVIVLELKGSETTFMCEYADETATIVEFLNRWITFSQSTIST | |
| | LTGGGSGR | |
| Chain 3: | SDNHGGAELCDDDPPEIPHATFKAMAYKEGTMLNCECKRGFRRIKSGSLYMLC | 274 |
| SDNH- | TGNSSHSSWDNQCQCTSSATRNTTKQVTPQPEEQKERKTTEMQSPMQPVDQAS | |
| GGA-R | LPGHCREPPPWENEATERIYHFVVGQMVYYQCVQGYRALHRGPAESVCKMTHG | |
| | KTRWTQPQLICTGE | |

P1834 Cleaved proteins (Complete MMP-2/MMP-9 cleavage)

| | | |
|---|---|---|
| Chains 1 | EPKSSDKTHTCPPCPAPEAAGGPSVFLFPPKPKDTLMISRTPEVTCVVVDVSH | 275 |
| and 2: | EDPEVKFNWYVDGVEVHNAKTKPREEQYNSTYRVVSVLTVLHQDWLNGKEYKC | |
| Fc(G1_AAA_C217S)_delK- | KVSNKALAAPIEKTISKAKGQPREPQVYTLPPSRDELTKNQVSLTCLVKGFYP | |
| GS-PLG | SDIAVEWESNGQPENNYKTTPPVLDSDGSFFLYSKLTVDKSRWQQGNVFSCSV | |
| | MHEALHNHYTQKSLSLSPGGSPLG | |
| Chains 3 | LAGSAPASSSTKKTQLQLEHLLLDLQMILNGINNYKNPKLTRMLTFKFYMPKK | 276 |
| and 4: | ATELKHLQCLEEELKPLEEALNLAPSKNFHLRPRDLISNINVIVLELKGSETT | |
| LAG-S- | FMCEYADETATIVEFLNRWITFSQSTISTLTGGGSGRSDNHGGAELCDDDPPE | |
| L_T3A- | IPHATFKAMAYKEGTMLNCECKRGFRRIKSGSLYMLCTGNSSHSSWDNQCQCT | |
| GGG- | SSATRNTTKQVTPQPEEQKERKTTEMQSPMQPVDQASLPGHCREPPPWENEAT | |
| SGRSDNH- | ERIYHFVVGQMVYYQCVQGYRALHRGPAESVCKMTHGKTRWTQPQLICTGE | |
| GGA-R | | |

P1834 Cleaved proteins (Partial MMP-2/MMP-9 cleavage)

| | | |
|---|---|---|
| Chain 1: | EPKSSDKTHTCPPCPAPEAAGGPSVFLFPPKPKDTLMISRTPEVTCVVVDVSH | 277 |
| Fc(G1_AAA_C217S)_delK- | EDPEVKFNWYVDGVEVHNAKTKPREEQYNSTYRVVSVLTVLHQDWLNGKEYKC | |
| GS- | KVSNKALAAPIEKTISKAKGQPREPQVYTLPPSRDELTKNQVSLTCLVKGFYP | |
| PLGLAG- | SDIAVEWESNGQPENNYKTTPPVLDSDGSFFLYSKLTVDKSRWQQGNVFSCSV | |
| S-L_T3A- | MHEALHNHYTQKSLSLSPGGSPLGLAGSAPASSSTKKTQLQLEHLLLDLQMIL | |
| GGG- | NGINNYKNPKLTRMLTFKFYMPKKATELKHLQCLEEELKPLEEALNLAPSKNF | |
| SGRSDNH- | HLRPRDLISNINVIVLELKGSETTFMCEYADETATIVEFLNRWITFSQSTIST | |
| GGA-R | LTGGGSGRSDNHGGAELCDDDPPEIPHATFKAMAYKEGTMLNCECKRGFRRIK | |
| | SGSLYMLCTGNSSHSSWDNQCQCTSSATRNTTKQVTPQPEEQKERKTTEMQSP | |
| | MQPVDQASLPGHCREPPPWENEATERIYHFVVGQMVYYQCVQGYRALHRGPAE | |
| | SVCKMTHGKTRWTQPQLICTGE | |
| Chain 2: | EPKSSDKTHTCPPCPAPEAAGGPSVFLFPPKPKDTLMISRTPEVTCVVVDVSH | 278 |
| Fc(G1_AAA_C217S)_delK- | EDPEVKFNWYVDGVEVHNAKTKPREEQYNSTYRVVSVLTVLHQDWLNGKEYKC | |
| GS-PLG | KVSNKALAAPIEKTISKAKGQPREPQVYTLPPSRDELTKNQVSLTCLVKGFYP | |
| | SDIAVEWESNGQPENNYKTTPPVLDSDGSFFLYSKLTVDKSRWQQGNVFSCSV | |
| | MHEALHNHYTQKSLSLSPGGSPLG | |
| Chain 3: | LAGSAPASSSTKKTQLQLEHLLLDLQMILNGINNYKNPKLTRMLTFKFYMPKK | 279 |
| LAG-S- | ATELKHLQCLEEELKPLEEALNLAPSKNFHLRPRDLISNINVIVLELKGSETT | |
| L_T3A- | FMCEYADETATIVEFLNRWITFSQSTISTLTGGGSGRSDNHGGAELCDDDPPE | |
| GGG- | IPHATFKAMAYKEGTMLNCECKRGFRRIKSGSLYMLCTGNSSHSSWDNQCQCT | |
| SGRSDNH- | SSATRNTTKQVTPQPEEQKERKTTEMQSPMQPVDQASLPGHCREPPPWENEAT | |
| GGA-R | ERIYHFVVGQMVYYQCVQGYRALHRGPAESVCKMTHGKTRWTQPQLICTGE | |

P1834 Cleaved proteins (Complete Legumain cleavage)

| | | |
|---|---|---|
| Chains 1 | EPKSSDKTHTCPPCPAPEAAGGPSVFLFPPKPKDTLMISRTPEVTCVVVDVSH | 280 |
| and 2: | EDPEVKFNWYVDGVEVHNAKTKPREEQYNSTYRVVSVLTVLHQDWLNGKEYKC | |
| Fc(G1_AAA_C217S)_delK- | KVSNKALAAPIEKTISKAKGQPREPQVYTLPPSRDELTKNQVSLTCLVKGFYP | |
| GS- | SDIAVEWESNGQPENNYKTTPPVLDSDGSFFLYSKLTVDKSRWQQGNVFSCSV | |
| PLGLAG- | MHEALHNHYTQKSLSLSPGGSPLGLAGSAPASSSTKKTQLQLEHLLLDLQMIL | |
| S-L_T3A- | NGINNYKNPKLTRMLTFKFYMPKKATELKHLQCLEEELKPLEEALNLAPSKNF | |
| GGG- | HLRPRDLISNINVIVLELKGSETTFMCEYADETATIVEFLNRWITFSQSTIST | |
| SGRSDN | LTGGGSGRSDN | |
| Chains 3 | HGGAELCDDDPPEIPHATFKAMAYKEGTMLNCECKRGFRRIKSGSLYMLCTGN | 281 |
| and 4: | SSHSSWDNQCQCTSSATRNTTKQVTPQPEEQKERKTTEMQSPMQPVDQASLPG | |
| H-GGA-R | HCREPPPWENEATERIYHFVVGQMVYYQCVQGYRALHRGPAESVCKMTHGKTR | |
| | WTQPQLICTGE | |

P1834 Cleaved proteins (Partial Legumain cleavage)

| | | |
|---|---|---|
| Chain 1: | EPKSSDKTHTCPPCPAPEAAGGPSVFLFPPKPKDTLMISRTPEVTCVVVDVSH | 282 |
| Fc(G1_AAA_C217S)_delK- | EDPEVKFNWYVDGVEVHNAKTKPREEQYNSTYRVVSVLTVLHQDWLNGKEYKC | |
| GS- | KVSNKALAAPIEKTISKAKGQPREPQVYTLPPSRDELTKNQVSLTCLVKGFYP | |
| PLGLAG- | SDIAVEWESNGQPENNYKTTPPVLDSDGSFFLYSKLTVDKSRWQQGNVFSCSV | |
| S-L_T3A- | MHEALHNHYTQKSLSLSPGGSPLGLAGSAPASSSTKKTQLQLEHLLLDLQMIL | |
| GGG- | NGINNYKNPKLTRMLTFKFYMPKKATELKHLQCLEEELKPLEEALNLAPSKNF | |
| SGRSDNH- | HLRPRDLISNINVIVLELKGSETTFMCEYADETATIVEFLNRWITFSQSTIST | |
| GGA-R | LTGGGSGRSDNHGGAELCDDDPPEIPHATFKAMAYKEGTMLNCECKRGFRRIK | |
| | SGSLYMLCTGNSSHSSWDNQCQCTSSATRNTTKQVTPQPEEQKERKTTEMQSP | |
| | MQPVDQASLPGHCREPPPWENEATERIYHFVVGQMVYYQCVQGYRALHRGPAE | |
| | SVCKMTHGKTRWTQPQLICTGE | |
| Chain 2: | EPKSSDKTHTCPPCPAPEAAGGPSVFLFPPKPKDTLMISRTPEVTCVVVDVSH | 283 |
| Fc(G1_AAA_C217S)_delK- | EDPEVKFNWYVDGVEVHNAKTKPREEQYNSTYRVVSVLTVLHQDWLNGKEYKC | |
| GS- | KVSNKALAAPIEKTISKAKGQPREPQVYTLPPSRDELTKNQVSLTCLVKGFYP | |
| PLGLAG- | SDIAVEWESNGQPENNYKTTPPVLDSDGSFFLYSKLTVDKSRWQQGNVFSCSV | |
| S-L_T3A- | MHEALHNHYTQKSLSLSPGGSPLGLAGSAPASSSTKKTQLQLEHLLLDLQMIL | |
| GGG- | NGINNYKNPKLTRMLTFKFYMPKKATELKHLQCLEEELKPLEEALNLAPSKNF | |
| SGRSDN | HLRPRDLISNINVIVLELKGSETTFMCEYADETATIVEFLNRWITFSQSTIST | |
| | LTGGGSGRSDN | |
| Chain 3: | HGGAELCDDDPPEIPHATFKAMAYKEGTMLNCECKRGFRRIKSGSLYMLCTGN | 284 |
| H-GGA-R | SSHSSWDNQCQCTSSATRNTTKQVTPQPEEQKERKTTEMQSPMQPVDQASLPG | |
| | HCREPPPWENEATERIYHFVVGQMVYYQCVQGYRALHRGPAESVCKMTHGKTR | |
| | WTQPQLICTGE | |

P1834 Cleaved proteins (Complete uPA/Matriptase cleavage,
complete MMP-2/MMP-9 cleavage)

| | | |
|---|---|---|
| Chains 1 | EPKSSDKTHTCPPCPAPEAAGGPSVFLFPPKPKDTLMISRTPEVTCVVVDVSH | 285 |
| and 2: | EDPEVKFNWYVDGVEVHNAKTKPREEQYNSTYRVVSVLTVLHQDWLNGKEYKC | |
| Fc(G1_AAA_C217S)_delK- | KVSNKALAAPIEKTISKAKGQPREPQVYTLPPSRDELTKNQVSLTCLVKGFYP | |
| GS-PLG | SDIAVEWESNGQPENNYKTTPPVLDSDGSFFLYSKLTVDKSRWQQGNVFSCSV | |
| | MHEALHNHYTQKSLSLSPGGSPLG | |
| Chains 3 | LAGSAPASSSTKKTQLQLEHLLLDLQMILNGINNYKNPKLTRMLTFKFYMPKK | 286 |
| and 4: | ATELKHLQCLEEELKPLEEALNLAPSKNFHLRPRDLISNINVIVLELKGSETT | |
| LAG-S- | FMCEYADETATIVEFLNRWITFSQSTISTLTGGGSGR | |
| L_T3A- | | |
| GGG-SGR | | |
| Chains 5 | SDNHGGAELCDDDPPEIPHATFKAMAYKEGTMLNCECKRGFRRIKSGSLYMLC | 287 |
| and 6: | TGNSSHSSWDNQCQCTSSATRNTTKQVTPQPEEQKERKTTEMQSPMQPVDQAS | |
| SDNH- | LPGHCREPPPWENEATERIYHFVVGQMVYYQCVQGYRALHRGPAESVCKMTHG | |
| GGA-R | KTRWTQPQLICTGE | |

P1834 Cleaved proteins (Complete uPA/Matriptase cleavage,
partial MMP-2/MMP-9 cleavage)

| | | |
|---|---|---|
| Chains 1 | EPKSSDKTHTCPPCPAPEAAGGPSVFLFPPKPKDTLMISRTPEVTCVVVDVSH | 288 |
| and 2: | EDPEVKFNWYVDGVEVHNAKTKPREEQYNSTYRVVSVLTVLHQDWLNGKEYKC | |
| Fc(G1_AAA_C217S)_delK- | KVSNKALAAPIEKTISKAKGQPREPQVYTLPPSRDELTKNQVSLTCLVKGFYP | |
| GS-PLG | SDIAVEWESNGQPENNYKTTPPVLDSDGSFFLYSKLTVDKSRWQQGNVFSCSV | |
| | MHEALHNHYTQKSLSLSPGGSPLG | |
| Chain 3: | LAGSAPASSSTKKTQLQLEHLLLDLQMILNGINNYKNPKLTRMLTFKFYMPKK | 289 |
| LAG-S- | ATELKHLQCLEEELKPLEEALNLAPSKNFHLRPRDLISNINVIVLELKGSETT | |
| L_T3A- | FMCEYADETATIVEFLNRWITFSQSTISTLTGGGSGRSDNHGGAELCDDDPPE | |
| GGG- | IPHATFKAMAYKEGTMLNCECKRGFRRIKSGSLYMLCTGNSSHSSWDNQCQCT | |
| SGRSDNH- | SSATRNTTKQVTPQPEEQKERKTTEMQSPMQPVDQASLPGHCREPPPWENEAT | |
| GGA-R | ERIYHFVVGQMVYYQCVQGYRALHRGPAESVCKMTHGKTRWTQPQLICTGE | |
| Chain 4: | LAGSAPASSSTKKTQLQLEHLLLDLQMILNGINNYKNPKLTRMLTFKFYMPKK | 290 |
| LAG-S- | ATELKHLQCLEEELKPLEEALNLAPSKNFHLRPRDLISNINVIVLELKGSETT | |
| L_T3A- | FMCEYADETATIVEFLNRWITFSQSTISTLTGGGSGR | |
| GGG- SGR | | |
| Chain 5: | SDNHGGAELCDDDPPEIPHATFKAMAYKEGTMLNCECKRGFRRIKSGSLYMLC | 291 |
| SDNH- | TGNSSHSSWDNQCQCTSSATRNTTKQVTPQPEEQKERKTTEMQSPMQPVDQAS | |
| GGA-R | LPGHCREPPPWENEATERIYHFVVGQMVYYQCVQGYRALHRGPAESVCKMTHG | |
| | KTRWTQPQLICTGE | |

P1834 Cleaved proteins (Partial uPA/Matriptase cleavage,
complete MMP-2/MMP-9 cleavage)

| | | |
|---|---|---|
| Chain 1: | EPKSSDKTHTCPPCPAPEAAGGPSVFLFPPKPKDTLMISRTPEVTCVVVDVSH | 292 |
| Fc(G1_AAA_C217S)_delK- | EDPEVKFNWYVDGVEVHNAKTKPREEQYNSTYRVVSVLTVLHQDWLNGKEYKC | |
| GS- | KVSNKALAAPIEKTISKAKGQPREPQVYTLPPSRDELTKNQVSLTCLVKGFYP | |
| PLGLAG- | SDIAVEWESNGQPENNYKTTPPVLDSDGSFFLYSKLTVDKSRWQQGNVFSCSV | |
| S-L_T3A- | MHEALHNHYTQKSLSLSPGGSPLGLAGSAPASSSTKKTQLQLEHLLLDLQMIL | |
| GGG-SGP | NGINNYKNPKLTRMLTFKFYMPKKATELKHLQCLEEELKPLEEALNLAPSKNF | |
| | HLRPRDLISNINVIVLELKGSETTFMCEYADETATIVEFLNRWITFSQSTIST | |
| | LTGGGSGR | |
| Chain 2: | EPKSSDKTHTCPPCPAPEAAGGPSVFLFPPKPKDTLMISRTPEVTCVVVDVSH | 293 |
| Fc(G1_AAA_C217S)_delK- | EDPEVKFNWYVDGVEVHNAKTKPREEQYNSTYRVVSVLTVLHQDWLNGKEYKC | |
| GS-PLG | KVSNKALAAPIEKTISKAKGQPREPQVYTLPPSRDELTKNQVSLTCLVKGFYP | |
| | SDIAVEWESNGQPENNYKTTPPVLDSDGSFFLYSKLTVDKSRWQQGNVFSCSV | |
| | MHEALHNHYTQKSLSLSPGGSPLG | |
| Chain 3: | LAGSAPASSSTKKTQLQLEHLLLDLQMILNGINNYKNPKLTRMLTFKFYMPKK | 294 |
| LAG-S- | ATELKHLQCLEEELKPLEEALNLAPSKNFHLRPRDLISNINVIVLELKGSETT | |
| L_T3A- | FMCEYADETATIVEFLNRWITFSQSTISTLTGGGSGR | |
| GGG- SGP | | |
| Chains 4 | SDNHGGAELCDDDPPEIPHATFKAMAYKEGTMLNCECKRGFRRIKSGSLYMLC | 295 |
| and 5: | TGNSSHSSWDNQCQCTSSATRNTTKQVTPQPEEQKERKTTEMQSPMQPVDQAS | |
| SDNH- | LPGHCREPPPWENEATERIYHFVVGQMVYYQCVQGYRALHRGPAESVCKMTHG | |
| GGA-R | KTRWTQPQLICTGE | |

P1834 Cleaved proteins (Partial uPA/Matriptase cleavage,
partial MMP-2/MMP-9 cleavage)

| | | |
|---|---|---|
| Chain 1: | EPKSSDKTHTCPPCPAPEAAGGPSVFLFPPKPKDTLMISRTPEVTCVVVDVSH | 296 |
| Fc(G1_AAA_C217S)_delK- | EDPEVKFNWYVDGVEVHNAKTKPREEQYNSTYRVVSVLTVLHQDWLNGKEYKC | |
| GS- | KVSNKALAAPIEKTISKAKGQPREPQVYTLPPSRDELTKNQVSLTCLVKGFYP | |
| PLGLAG- | SDIAVEWESNGQPENNYKTTPPVLDSDGSFFLYSKLTVDKSRWQQGNVFSCSV | |
| S-L_T3A- | MHEALHNHYTQKSLSLSPGGSPLGLAGSAPASSSTKKTQLQLEHLLLDLQMIL | |
| GGG- | NGINNYKNPKLTRMLTFKFYMPKKATELKHLQCLEEELKPLEEALNLAPSKNF | |
| SGRSDNH- | HLRPRDLISNINVIVLELKGSETTFMCEYADETATIVEFLNRWITFSQSTIST | |
| GGA-R | LTGGGSGRSDNHGGAELCDDDPPEIPHATFKAMAYKEGTMLNCECKRGFRRIK | |
| | SGSLYMLCTGNSSHSSWDNQCQCTSSATRNTTKQVTPQPEEQKERKTTEMQSP | |
| | MQPVDQASLPGHCREPPPWENEATERIYHFVVGQMVYYQCVQGYRALHRGPAE | |
| | SVCKMTHGKTRWTQPQLICTGE | |
| Chain 2: | EPKSSDKTHTCPPCPAPEAAGGPSVFLFPPKPKDTLMISRTPEVTCVVVDVSH | 297 |
| Fc(G1_AAA_C217S)_delK- | EDPEVKFNWYVDGVEVHNAKTKPREEQYNSTYRVVSVLTVLHQDWLNGKEYKC | |
| GS-PLG | KVSNKALAAPIEKTISKAKGQPREPQVYTLPPSRDELTKNQVSLTCLVKGFYP | |
| | SDIAVEWESNGQPENNYKTTPPVLDSDGSFFLYSKLTVDKSRWQQGNVFSCSV | |
| | MHEALHNHYTQKSLSLSPGGSPLG | |
| Chain 3: | LAGSAPASSSTKKTQLQLEHLLLDLQMILNGINNYKNPKLTRMLTFKFYMPKK | 298 |
| LAG-S- | ATELKHLQCLEEELKPLEEALNLAPSKNFHLRPRDLISNINVIVLELKGSETT | |
| L_T3A- | FMCEYADETATIVEFLNRWITFSQSTISTLTGGGSGRSDNHGGAELCDDDPPE | |
| GGG- | IPHATFKAMAYKEGTMLNCECKRGFRRIKSGSLYMLCTGNSSHSSWDNQCQCT | |
| SGRSDNH- | SSATRNTTKQVTPQPEEQKERKTTEMQSPMQPVDQASLPGHCREPPPWENEAT | |
| GGA-R | ERIYHFVVGQMVYYQCVQGYRALHRGPAESVCKMTHGKTRWTQPQLICTGE | |
| Chain 4: | EPKSSDKTHTCPPCPAPEAAGGPSVFLFPPKPKDTLMISRTPEVTCVVVDVSH | 299 |
| Fc(G1_AAA_C217S)_delK- | EDPEVKFNWYVDGVEVHNAKTKPREEQYNSTYRVVSVLTVLHQDWLNGKEYKC | |
| GS- | KVSNKALAAPIEKTISKAKGQPREPQVYTLPPSRDELTKNQVSLTCLVKGFYP | |
| PLGLAG- | SDIAVEWESNGQPENNYKTTPPVLDSDGSFFLYSKLTVDKSRWQQGNVFSCSV | |
| S-L_T3A- | MHEALHNHYTQKSLSLSPGGSPLGLAGSAPASSSTKKTQLQLEHLLLDLQMIL | |
| GGG-SGR | NGINNYKNPKLTRMLTFKFYMPKKATELKHLQCLEEELKPLEEALNLAPSKNF | |
| | HLRPRDLISNINVIVLELKGSETTFMCEYADETATIVEFLNRWITFSQSTIST | |
| | LTGGGSGR | |
| Chain 5: | SDNHGGAELCDDDPPEIPHATFKAMAYKEGTMLNCECKRGFRRIKSGSLYMLC | 300 |
| SDNH- | TGNSSHSSWDNQCQCTSSATRNTTKQVTPQPEEQKERKTTEMQSPMQPVDQAS | |
| GGA-R | LPGHCREPPPWENEATERIYHFVVGQMVYYQCVQGYRALHRGPAESVCKMTHG | |
| | KTRWTQPQLICTGE | |
| Chain 6: | LAGSAPASSSTKKTQLQLEHLLLDLQMILNGINNYKNPKLTRMLTFKFYMPKK | 301 |
| LAG-S- | ATELKHLQCLEEELKPLEEALNLAPSKNFHLRPRDLISNINVIVLELKGSETT | |
| L_T3A- | FMCEYADETATIVEFLNRWITFSQSTISTLTGGGSGR | |
| GGG-SGR | | |

P1834 Cleaved proteins (Complete uPA/Matriptase cleavage,
complete Legumain cleavage)

| | | |
|---|---|---|
| Chains 1 | EPKSSDKTHTCPPCPAPEAAGGPSVFLFPPKPKDTLMISRTPEVTCVVVDVSH | 302 |
| and 2: | EDPEVKFNWYVDGVEVHNAKTKPREEQYNSTYRVVSVLTVLHQDWLNGKEYKC | |
| Fc(G1_AAA_C217S)_delK- | KVSNKALAAPIEKTISKAKGQPREPQVYTLPPSRDELTKNQVSLTCLVKGFYP | |
| GS-PLG | SDIAVEWESNGQPENNYKTTPPVLDSDGSFFLYSKLTVDKSRWQQGNVFSCSV | |
| | MHEALHNHYTQKSLSLSPGGSPLG | |
| Chains 3 | LAGSAPASSSTKKTQLQLEHLLLDLQMILNGINNYKNPKLTRMLTFKFYMPKK | 303 |
| and 4: | ATELKHLQCLEEELKPLEEALNLAPSKNFHLRPRDLISNINVIVLELKGSETT | |
| LAG-S- | FMCEYADETATIVEFLNRWITFSQSTISTLTGGGSGRSDN | |
| L_T3A- | | |
| GGG- | | |
| SGRSDN | | |
| Chains 5 | HGGAELCDDDPPEIPHATFKAMAYKEGTMLNCECKRGFRRIKSGSLYMLCTGN | 304 |
| and 6: | SSHSSWDNQCQCTSSATRNTTKQVTPQPEEQKERKTTEMQSPMQPVDQASLPG | |
| H-GGA-R | HCREPPPWENEATERIYHFVVGQMVYYQCVQGYRALHRGPAESVCKMTHGKTR | |
| | WTQPQLICTGE | |

P1834 Cleaved proteins (Complete uPA/Matriptase cleavage,
partial Legumain cleavage)

| | | |
|---|---|---|
| Chains 1 | EPKSSDKTHTCPPCPAPEAAGGPSVFLFPPKPKDTLMISRTPEVTCVVVDVSH | 305 |
| and 2: | EDPEVKFNWYVDGVEVHNAKTKPREEQYNSTYRVVSVLTVLHQDWLNGKEYKC | |
| Fc(G1_AAA_C217S)_delK- | KVSNKALAAPIEKTISKAKGQPREPQVYTLPPSRDELTKNQVSLTCLVKGFYP | |
| | SDIAVEWESNGQPENNYKTTPPVLDSDGSFFLYSKLTVDKSRWQQGNVFSCSV | |
| | MHEALHNHYTQKSLSLSPGGSPLG | |
| GS-PLG | | |
| Chain 3: | LAGSAPASSSTKKTQLQLEHLLLDLQMILNGINNYKNPKLTRMLTFKFYMPKK | 306 |
| LAG-S- | ATELKHLQCLEEELKPLEEALNLAPSKNFHLRPRDLISNINVIVLELKGSETT | |
| L_T3A- | FMCEYADETATIVEFLNRWITFSQSTISTLTGGGSGRSDNHGGAELCDDDPPE | |
| GGG- | IPHATFKAMAYKEGTMLNCECKRGFRRIKSGSLYMLCTGNSSHSSWDNQCQCT | |
| SGRSDNH- | SSATRNTTKQVTPQPEEQKERKTTEMQSPMQPVDQASLPGHCREPPPWENEAT | |
| GGA-R | ERIYHFVVGQMVYYQCVQGYRALHRGPAESVCKMTHGKTRWTQPQLICTGE | |
| Chain 4: | LAGSAPASSSTKKTQLQLEHLLLDLQMILNGINNYKNPKLTRMLTFKFYMPKK | 307 |
| LAG-S- | ATELKHLQCLEEELKPLEEALNLAPSKNFHLRPRDLISNINVIVLELKGSETT | |
| L_T3A- | FMCEYADETATIVEFLNRWITFSQSTISTLTGGGSGRSDN | |
| GGG- | | |
| SGRSDN | | |
| Chain 5: | HGGAELCDDDPPEIPHATFKAMAYKEGTMLNCECKRGFRRIKSGSLYMLCTGN | 308 |
| H-GGA-R | SSHSSWDNQCQCTSSATRNTTKQVTPQPEEQKERKTTEMQSPMQPVDQASLPG | |
| | HCREPPPWENEATERIYHFVVGQMVYYQCVQGYRALHRGPAESVCKMTHGKTR | |
| | WTQPQLICTGE | |

P1834 Cleaved proteins (Partial uPA/Matriptase cleavage,
complete Legumain cleavage)

| | | |
|---|---|---|
| Chain 1: | EPKSSDKTHTCPPCPAPEAAGGPSVFLFPPKPKDTLMISRTPEVTCVVVDVSH | 309 |
| Fc(G1_AAA_C217S)_delK- | EDPEVKFNWYVDGVEVHNAKTKPREEQYNSTYRVVSVLTVLHQDWLNGKEYKC | |
| GS- | KVSNKALAAPIEKTISKAKGQPREPQVYTLPPSRDELTKNQVSLTCLVKGFYP | |
| PLGLAG- | SDIAVEWESNGQPENNYKTTPPVLDSDGSFFLYSKLTVDKSRWQQGNVFSCSV | |
| S-L_T3A- | MHEALHNHYTQKSLSLSPGGSPLGLAGSAPASSSTKKTQLQLEHLLLDLQMIL | |
| GGG- | NGINNYKNPKLTRMLTFKFYMPKKATELKHLQCLEEELKPLEEALNLAPSKNF | |
| SGRSDN | HLRPRDLISNINVIVLELKGSETTFMCEYADETATIVEFLNRWITFSQSTIST | |
| | LTGGGSGRSDN | |
| Chain 2: | EPKSSDKTHTCPPCPAPEAAGGPSVFLFPPKPKDTLMISRTPEVTCVVVDVSH | 310 |
| Fc(G1_AAA_C217S)_delK- | EDPEVKFNWYVDGVEVHNAKTKPREEQYNSTYRVVSVLTVLHQDWLNGKEYKC | |
| GS-PLG | KVSNKALAAPIEKTISKAKGQPREPQVYTLPPSRDELTKNQVSLTCLVKGFYP | |
| | SDIAVEWESNGQPENNYKTTPPVLDSDGSFFLYSKLTVDKSRWQQGNVFSCSV | |
| | MHEALHNHYTQKSLSLSPGGSPLG | |
| Chain 3: | LAGSAPASSSTKKTQLQLEHLLLDLQMILNGINNYKNPKLTRMLTFKFYMPKK | 311 |
| LAG-S- | ATELKHLQCLEEELKPLEEALNLAPSKNFHLRPRDLISNINVIVLELKGSETT | |
| L_T3A- | FMCEYADETATIVEFLNRWITFSQSTISTLTGGGSGRSDN | |
| GGG- | | |
| SGRSDN | | |
| Chains 4 | HGGAELCDDDPPEIPHATFKAMAYKEGTMLNCECKRGFRRIKSGSLYMLCTGN | 312 |
| and 5: | SSHSSWDNQCQCTSSATRNTTKQVTPQPEEQKERKTTEMQSPMQPVDQASLPG | |
| H-GGA-R | HCREPPPWENEATERIYHFVVGQMVYYQCVQGYRALHRGPAESVCKMTHGKTR | |
| | WTQPQLICTGE | |

P1834 Cleaved proteins (Partial uPA/Matriptase cleavage,
partial Legumain cleavage)

| | | |
|---|---|---|
| Chain 1: | EPKSSDKTHTCPPCPAPEAAGGPSVFLFPPKPKDTLMISRTPEVTCVVVDVSH | 313 |
| Fc(G1_AAA_C217S)_delK- | EDPEVKFNWYVDGVEVHNAKTKPREEQYNSTYRVVSVLTVLHQDWLNGKEYKC | |
| GS- | KVSNKALAAPIEKTISKAKGQPREPQVYTLPPSRDELTKNQVSLTCLVKGFYP | |
| PLGLAG- | SDIAVEWESNGQPENNYKTTPPVLDSDGSFFLYSKLTVDKSRWQQGNVFSCSV | |
| S-L_T3A- | MHEALHNHYTQKSLSLSPGGSPLGLAGSAPASSSTKKTQLQLEHLLLDLQMIL | |
| GGG- | NGINNYKNPKLTRMLTFKFYMPKKATELKHLQCLEEELKPLEEALNLAPSKNF | |
| SGRSDNH- | HLRPRDLISNINVIVLELKGSETTFMCEYADETATIVEFLNRWITFSQSTIST | |
| GGA-R | LTGGGSGRSDNHGGAELCDDDPPEIPHATFKAMAYKEGTMLNCECKRGFRRIK | |
| | SGSLYMLCTGNSSHSSWDNQCQCTSSATRNTTKQVTPQPEEQKERKTTEMQSP | |
| | MQPVDQASLPGHCREPPPWENEATERIYHFVVGQMVYYQCVQGYRALHRGPAE | |
| | SVCKMTHGKTRWTQPQLICTGE | |
| Chain 2: | EPKSSDKTHTCPPCPAPEAAGGPSVFLFPPKPKDTLMISRTPEVTCVVVDVSH | 314 |
| Fc(G1_AAA_C217S)_delK- | EDPEVKFNWYVDGVEVHNAKTKPREEQYNSTYRVVSVLTVLHQDWLNGKEYKC | |
| GS-PLG | KVSNKALAAPIEKTISKAKGQPREPQVYTLPPSRDELTKNQVSLTCLVKGFYP | |
| | SDIAVEWESNGQPENNYKTTPPVLDSDGSFFLYSKLTVDKSRWQQGNVFSCSV | |
| | MHEALHNHYTQKSLSLSPGGSPLG | |
| Chain 3: | LAGSAPASSSTKKTQLQLEHLLLDLQMILNGINNYKNPKLTRMLTFKFYMPKK | 315 |
| LAG-S- | ATELKHLQCLEEELKPLEEALNLAPSKNFHLRPRDLISNINVIVLELKGSETT | |
| L_T3A- | FMCEYADETATIVEFLNRWITFSQSTISTLTGGGSGRSDNHGGAELCDDDPPE | |
| GGG- | IPHATFKAMAYKEGTMLNCECKRGFRRIKSGSLYMLCTGNSSHSSWDNQCQCT | |
| SGRSDNH- | SSATRNTTKQVTPQPEEQKERKTTEMQSPMQPVDQASLPGHCREPPPWENEAT | |
| GGA-R | ERIYHFVVGQMVYYQCVQGYRALHRGPAESVCKMTHGKTRWTQPQLICTGE | |
| Chain 4: | EPKSSDKTHTCPPCPAPEAAGGPSVFLFPPKPKDTLMISRTPEVTCVVVDVSH | 316 |
| Fc(G1_AAA_C217S)_delK- | EDPEVKFNWYVDGVEVHNAKTKPREEQYNSTYRVVSVLTVLHQDWLNGKEYKC | |
| GS- | KVSNKALAAPIEKTISKAKGQPREPQVYTLPPSRDELTKNQVSLTCLVKGFYP | |
| PLGLAG- | SDIAVEWESNGQPENNYKTTPPVLDSDGSFFLYSKLTVDKSRWQQGNVFSCSV | |
| S-L_T3A- | MHEALHNHYTQKSLSLSPGGSPLGLAGSAPASSSTKKTQLQLEHLLLDLQMIL | |
| GGG- | NGINNYKNPKLTRMLTFKFYMPKKATELKHLQCLEEELKPLEEALNLAPSKNF | |
| SGRSDN | HLRPRDLISNINVIVLELKGSETTFMCEYADETATIVEFLNRWITFSQSTIST | |
| | LTGGGSGRSDN | |
| Chain 5: | HGGAELCDDDPPEIPHATFKAMAYKEGTMLNCECKRGFRRIKSGSLYMLCTGN | 317 |
| H-GGA-R | SSHSSWDNQCQCTSSATRNTTKQVTPQPEEQKERKTTEMQSPMQPVDQASLPG | |
| | HCREPPPWENEATERIYHFVVGQMVYYQCVQGYRALHRGPAESVCKMTHGKTR | |
| | WTQPQLICTGE | |
| Chain 6: | LAGSAPASSSTKKTQLQLEHLLLDLQMILNGINNYKNPKLTRMLTFKFYMPKK | 318 |
| LAG-S- | ATELKHLQCLEEELKPLEEALNLAPSKNFHLRPRDLISNINVIVLELKGSETT | |
| L_T3A- | FMCEYADETATIVEFLNRWITFSQSTISTLTGGGSGRSDN | |
| GGG- | | |
| SGRSDN | | |

P1835 Activatable Proprotein

| | | |
|---|---|---|
| Chains 1 | EPKSSDKTHTCPPCPAPEAAGGPSVFLFPPKPKDTLMISRTPEVTCVVVDVSH | 319 |
| and 2: | EDPEVKFNWYVDGVEVHNAKTKPREEQYNSTYRVVSVLTVLHQDWLNGKEYKC | |
| Fc(G1_AAA_C217S)_delK- | KVSNKALAAPIEKTISKAKGQPREPQVYTLPPSRDELTKNQVSLTCLVKGFYP | |
| GS- | SDIAVEWESNGQPENNYKTTPPVLDSDGSFFLYSKLTVDKSRWQQGNVFSCSV | |
| PLGLAG- | MHEALHNHYTQKSLSLSPGGSPLGLAGGSAPASSSTKKTQLQLEHLLLDLQMI | |
| GS- | LNGINNYKNPKLTRMLTFKFYMPKKATELKHLQCLEEELKPLEEALNLAPSKN | |
| L_T3A- | FHLRPRDLISNINVIVLELKGSETTFMCEYADETATIVEFLNRWITFSQSTIS | |
| GGG- | TLTGGGSGRSDNHGGAELCDDDPPEIPHATFKAMAYKEGTMLNCECKRGFRRI | |
| SGRSDNH- | KSGSLYMLCTGNSSHSSWDNQCQCTSSATRNTTKQVTPQPEEQKERKTTEMQS | |
| GGA-R | PMQPVDQASLPGHCREPPPWENEATERIYHFVVGQMVYYQCVQGYRALHRGPA | |
| 10/13 | ESVCKMTHGKTRWTQPQLICTGE | |

P1836 Activatable Proprotein

| | | |
|---|---|---|
| Chains 1 | EPKSSDKTHTCPPCPAPEAAGGPSVFLFPPKPKDTLMISRTPEVTCVVVDVSH | 320 |
| and 2: | EDPEVKFNWYVDGVEVHNAKTKPREEQYNSTYRVVSVLTVLHQDWLNGKEYKC | |
| Fc(G1_AAA_C217S)_delK- | KVSNKALAAPIEKTISKAKGQPREPQVYTLPPSRDELTKNQVSLTCLVKGFYP | |
| GGS- | SDIAVEWESNGQPENNYKTTPPVLDSDGSFFLYSKLTVDKSRWQQGNVFSCSV | |
| PLGLAG- | MHEALHNHYTQKSLSLSPGGGSPLGLAGGSAPASSSTKKTQLQLEHLLLDLQM | |
| GS- | ILNGINNYKNPKLTRMLTFKFYMPKKATELKHLQCLEEELKPLEEALNLAPSK | |
| L_T3A- | NFHLRPRDLISNINVIVLELKGSETTFMCEYADETATIVEFLNRWITFSQSTI | |
| GGG- | STLTGGGSGRSDNHGGAELCDDDPPEIPHATFKAMAYKEGTMLNCECKRGFRR | |
| SGRSDNH- | IKSGSLYMLCTGNSSHSSWDNQCQCTSSATRNTTKQVTPQPEEQKERKTTEMQ | |
| GGA-R | SPMQPVDQASLPGHCREPPPWENEATERIYHFVVGQMVYYQCVQGYRALHRGP | |
| 11/13 | AESVCKMTHGKTRWTQPQLICTGE | |

P1837 Activatable Proprotein

| | | |
|---|---|---|
| Chains 1 | EPKSSDKTHTCPPCPAPEAAGGPSVFLFPPKPKDTLMISRTPEVTCVVVDVSH | 321 |
| and 2: | EDPEVKFNWYVDGVEVHNAKTKPREEQYNSTYRVVSVLTVLHQDWLNGKEYKC | |
| Fc(G1_AAA_C217S)_delK- | KVSNKALAAPIEKTISKAKGQPREPQVYTLPPSRDELTKNQVSLTCLVKGFYP | |
| GGS- | SDIAVEWESNGQPENNYKTTPPVLDSDGSFFLYSKLTVDKSRWQQGNVFSCSV | |
| PLGLAG- | MHEALHNHYTQKSLSLSPGGGSPLGLAGGGSAPASSSTKKTQLQLEHLLLDLQ | |
| GGS- | MILNGINNYKNPKLTRMLTFKFYMPKKATELKHLQCLEEELKPLEEALNLAPS | |
| L_T3A- | KNFHLRPRDLISNINVIVLELKGSETTFMCEYADETATIVEFLNRWITFSQST | |
| GGG- | ISTLTGGGSGRSDNHGGAELCDDDPPEIPHATFKAMAYKEGTMLNCECKRGFR | |
| SGRSDNH- | RIKSGSLYMLCTGNSSHSSWDNQCQCTSSATRNTTKQVTPQPEEQKERKTTEM | |
| GGA-R | QSPMQPVDQASLPGHCREPPPWENEATERIYHFVVGQMVYYQCVQGYRALHRG | |
| 12/13 | PAESVCKMTHGKTRWTQPQLICTGE | |

P1838 Activatable Proprotein

| | | |
|---|---|---|
| Chains 1 | EPKSSDKTHTCPPCPAPEAAGGPSVFLFPPKPKDTLMISRTPEVTCVVVDVSH | 322 |
| and 2: | EDPEVKFNWYVDGVEVHNAKTKPREEQYNSTYRVVSVLTVLHQDWLNGKEYKC | |
| Fc(G1_AAA_C217S)_delK- | KVSNKALAAPIEKTISKAKGQPREPQVYTLPPSRDELTKNQVSLTCLVKGFYP | |
| GGGS- | SDIAVEWESNGQPENNYKTTPPVLDSDGSFFLYSKLTVDKSRWQQGNVFSCSV | |
| PLGLAG- | MHEALHNHYTQKSLSLSPGGGGSPLGLAGGGSAPASSSTKKTQLQLEHLLLDL | |
| GGS- | QMILNGINNYKNPKLTRMLTFKFYMPKKATELKHLQCLEEELKPLEEALNLAP | |
| L_T3A- | SKNFHLRPRDLISNINVIVLELKGSETTFMCEYADETATIVEFLNRWITFSQS | |
| GGG- | TISTLTGGGSGRSDNHGGAELCDDDPPEIPHATFKAMAYKEGTMLNCECKRGF | |
| SGRSDNH- | RRIKSGSLYMLCTGNSSHSSWDNQCQCTSSATRNTTKQVTPQPEEQKERKTTE | |
| GGA-R | MQSPMQPVDQASLPGHCREPPPWENEATERIYHFVVGQMVYYQCVQGYRALHR | |
| 13/13 | GPAESVCKMTHGKTRWTQPQLICTGE | |

P1839 Activatable Proprotein

| | | |
|---|---|---|
| Chains 1 | EPKSSDKTHTCPPCPAPEAAGGPSVFLFPPKPKDTLMISRTPEVTCVVVDVSH | 323 |
| and 2: | EDPEVKFNWYVDGVEVHNAKTKPREEQYNSTYRVVSVLTVLHQDWLNGKEYKC | |
| Fc(G1_AA | KVSNKALAAPIEKTISKAKGQPREPQVYTLPPSRDELTKNQVSLTCLVKGFYP | |
| A_C217S) | SDIAVEWESNGQPENNYKTTPPVLDSDGSFFLYSKLTVDKSRWQQGNVFSCSV | |
| _delK- | MHEALHNHYTQKSLSLSPGGGGSPLGLAGGGGSAPASSSTKKTQLQLEHLLLD | |
| GGGS- | LQMILNGINNYKNPKLTRMLTFKFYMPKKATELKHLQCLEEELKPLEEALNLA | |
| PLGLAG- | PSKNFHLRPRDLISNINVIVLELKGSETTFMCEYADETATIVEFLNRWITFSQ | |
| GGGS- | STISTLTGGGSGRSDNHGGAELCDDDPPEIPHATFKAMAYKEGTMLNCECKRG | |
| L_T3A- | FRRIKSGSLYMLCTGNSSHSSWDNQCQCTSSATRNTTKQVTPQPEEQKERKTT | |
| GGG- | EMQSPMQPVDQASLPGHCREPPPWENEATERIYHFVVGQMVYYQCVQGYRALH | |
| SGRSDNH- | RGPAESVCKMTHGKTRWTQPQLICTGE | |
| GGA-R | | |
| 14/13 | | |

P1840 Activatable Proprotein

| | | |
|---|---|---|
| Chains 1 | EPKSSDKTHTCPPCPAPEAAGGPSVFLFPPKPKDTLMISRTPEVTCVVVDVSH | 324 |
| and 2: | EDPEVKFNWYVDGVEVHNAKTKPREEQYNSTYRVVSVLTVLHQDWLNGKEYKC | |
| Fc(G1_AAA_C217S)_delK- | KVSNKALAAPIEKTISKAKGQPREPQVYTLPPSRDELTKNQVSLTCLVKGFYP | |
| GS- | SDIAVEWESNGQPENNYKTTPPVLDSDGSFFLYSKLTVDKSRWQQGNVFSCSV | |
| PLGLAG- | MHEALHNHYTQKSLSLSPGGSPLGLAGGSAPASSSTKKTQLQLEHLLLDLQMI | |
| GS- | LNGINNYKNPKLTRMLTFKFYMPKKATELKHLQCLEEELKPLEEALNLAPSKN | |
| L_T3A- | FHLRPRDLISNINVIVLELKGSETTFMCEYADETATIVEFLNRWITFSQSTIS | |
| GGGG- | TLTGGGGSGRSDNHGGAELCDDDPPEIPHATFKAMAYKEGTMLNCECKRGFRR | |
| SGRSDNH- | IKSGSLYMLCTGNSSHSSWDNQCQCTSSATRNTTKQVTPQPEEQKERKTTEMQ | |
| GGA-R | SPMQPVDQASLPGHCREPPPWENEATERIYHFVVGQMVYYQCVQGYRALHRGP | |
| 10/14 | AESVCKMTHGKTRWTQPQLICTGE | |

P1841 Activatable Proprotein

| | | |
|---|---|---|
| Chains 1 | EPKSSDKTHTCPPCPAPEAAGGPSVFLFPPKPKDTLMISRTPEVTCVVVDVSH | 325 |
| and 2: | EDPEVKFNWYVDGVEVHNAKTKPREEQYNSTYRVVSVLTVLHQDWLNGKEYKC | |
| Fc(G1_AAA_C217S)_delK- | KVSNKALAAPIEKTISKAKGQPREPQVYTLPPSRDELTKNQVSLTCLVKGFYP | |
| GS- | SDIAVEWESNGQPENNYKTTPPVLDSDGSFFLYSKLTVDKSRWQQGNVFSCSV | |
| PLGLAG- | MHEALHNHYTQKSLSLSPGGSPLGLAGGSAPASSSTKKTQLQLEHLLLDLQMI | |
| GS- | LNGINNYKNPKLTRMLTFKFYMPKKATELKHLQCLEEELKPLEEALNLAPSKN | |
| L_T3A- | FHLRPRDLISNINVIVLELKGSETTFMCEYADETATIVEFLNRWITFSQSTIS | |
| GGGG- | TLTGGGGSGRSDNHGGGAELCDDDPPEIPHATFKAMAYKEGTMLNCECKRGFR | |
| SGRSDNH- | RIKSGSLYMLCTGNSSHSSWDNQCQCTSSATRNTTKQVTPQPEEQKERKTTEM | |
| GGGA-R | QSPMQPVDQASLPGHCREPPPWENEATERIYHFVVGQMVYYQCVQGYRALHRG | |
| 10/15 | PAESVCKMTHGKTRWTQPQLICTGE | |

P1842 Activatable Proprotein

| | | |
|---|---|---|
| Chains 1 | EPKSSDKTHTCPPCPAPEAAGGPSVFLFPPKPKDTLMISRTPEVTCVVVDVSH | 326 |
| and 2: | EDPEVKFNWYVDGVEVHNAKTKPREEQYNSTYRVVSVLTVLHQDWLNGKEYKC | |
| Fc(G1_AA | KVSNKALAAPIEKTISKAKGQPREPQVYTLPPSRDELTKNQVSLTCLVKGFYP | |
| A_C217S) | SDIAVEWESNGQPENNYKTTPPVLDSDGSFFLYSKLTVDKSRWQQGNVFSCSV | |
| _delK- | MHEALHNHYTQKSLSLSPGGSPLGLAGGSAPASSSTKKTQLQLEHLLLDLQMI | |
| GS- | LNGINNYKNPKLTRMLTFKFYMPKKATELKHLQCLEEELKPLEEALNLAPSKN | |
| PLGLAG- | FHLRPRDLISNINVIVLELKGSETTFMCEYADETATIVEFLNRWITFSQSTIS | |
| GS- | TLTGGGGSSGRSDNHGGGAELCDDDPPEIPHATFKAMAYKEGTMLNCECKRGF | |
| L_T3A- | RRIKSGSLYMLCTGNSSHSSWDNQCQCTSSATRNTTKQVTPQPEEQKERKTTE | |
| GGGGS- | MQSPMQPVDQASLPGHCREPPPWENEATERIYHFVVGQMVYYQCVQGYRALHR | |
| SGRSDNH- | GPAESVCKMTHGKTRWTQPQLICTGE | |
| GGGA-R | | |
| 10/16 | | |

P1843 Activatable Proprotein

| | | |
|---|---|---|
| Chains 1 | EPKSSDKTHTCPPCPAPEAAGGPSVFLFPPKPKDTLMISRTPEVTCVVVDVSH | 327 |
| and 2: | EDPEVKFNWYVDGVEVHNAKTKPREEQYNSTYRVVSVLTVLHQDWLNGKEYKC | |
| Fc(G1_AAA_C217S)_delK- | KVSNKALAAPIEKTISKAKGQPREPQVYTLPPSRDELTKNQVSLTCLVKGFYP | |
| GS- | SDIAVEWESNGQPENNYKTTPPVLDSDGSFFLYSKLTVDKSRWQQGNVFSCSV | |
| PLGLAG- | MHEALHNHYTQKSLSLSPGGSPLGLAGGSAPASSSTKKTQLQLEHLLLDLQMI | |
| GS- | LNGINNYKNPKLTRMLTFKFYMPKKATELKHLQCLEEELKPLEEALNLAPSKN | |
| L_T3A- | FHLRPRDLISNINVIVLELKGSETTFMCEYADETATIVEFLNRWITFSQSTIS | |
| GGGGS- | TLTGGGGSSGRSDNHGGGGAELCDDDPPEIPHATFKAMAYKEGTMLNCECKRG | |
| SGRSDNH- | FRRIKSGSLYMLCTGNSSHSSWDNQCQCTSSATRNTTKQVTPQPEEQKERKTT | |
| GGGGA-R | EMQSPMQPVDQASLPGHCREPPPWENEATERIYHFVVGQMVYYQCVQGYRALH | |
| 10/17 | RGPAESVCKMTHGKTRWTQPQLICTGE | |

P1844 Activatable Proprotein

| | | |
|---|---|---|
| Chains 1 | EPKSSDKTHTCPPCPAPEAAGGPSVFLFPPKPKDTLMISRTPEVTCVVVDVSH | 328 |
| and 2: | EDPEVKFNWYVDGVEVHNAKTKPREEQYNSTYRVVSVLTVLHQDWLNGKEYKC | |
| Fc(G1_AAA_C217S)_delK- | KVSNKALAAPIEKTISKAKGQPREPQVYTLPPSRDELTKNQVSLTCLVKGFYP | |
| GS- | SDIAVEWESNGQPENNYKTTPPVLDSDGSFFLYSKLTVDKSRWQQGNVFSCSV | |
| PLGLAG- | MHEALHNHYTQKSLSLSPGGSPLGLAGGSAPASSSTKKTQLQLEHLLLDLQMI | |
| GS- | LNGINNYKNPKLTRMLTFKFYMPKKATELKHLQCLEEELKPLEEALNLAPSKN | |
| L_T3A- | FHLRPRDLISNINVIVLELKGSETTFMCEYADETATIVEFLNRWITFSQSTIS | |
| GGSGGS- | TLTGGSGGSSGRSDNHGGGGAELCDDDPPEIPHATFKAMAYKEGTMLNCECKR | |
| SGRSDNH- | GFRRIKSGSLYMLCTGNSSHSSWDNQCQCTSSATRNTTKQVTPQPEEQKERKT | |
| GGGGA-R | TEMQSPMQPVDQASLPGHCREPPPWENEATERIYHFVVGQMVYYQCVQGYRAL | |
| 10/18 | HRGPAESVCKMTHGKTRWTQPQLICTGE | |

P1845 Activatable Proprotein

| | | |
|---|---|---|
| Chains 1 | EPKSSDKTHTCPPCPAPEAAGGPSVFLFPPKPKDTLMISRTPEVTCVVVDVSH | 329 |
| and 2: | EDPEVKFNWYVDGVEVHNAKTKPREEQYNSTYRVVSVLTVLHQDWLNGKEYKC | |
| Fc(G1_AAA_C217S)_delK- | KVSNKALAAPIEKTISKAKGQPREPQVYTLPPSRDELTKNQVSLTCLVKGFYP | |
| GS- | SDIAVEWESNGQPENNYKTTPPVLDSDGSFFLYSKLTVDKSRWQQGNVFSCSV | |
| PLGLAG- | MHEALHNHYTQKSLSLSPGGSPLGLAGGSAPASSSTKKTQLQLEHLLLDLQMI | |
| GS- | LNGINNYKNPKLTRMLTFKFYMPKKATELKHLQCLEEELKPLEEALNLAPSKN | |
| L_T3A- | FHLRPRDLISNINVIVLELKGSETTFMCEYADETATIVEFLNRWITFSQSTIS | |
| GGSGGS- | TLTGGSGGSSGRSDNHGGSGGAELCDDDPPEIPHATFKAMAYKEGTMLNCECK | |
| SGRSDNH- | RGFRRIKSGSLYMLCTGNSSHSSWDNQCQCTSSATRNTTKQVTPQPEEQKERK | |
| GGSGGA-R | TTEMQSPMQPVDQASLPGHCREPPPWENEATERIYHFVVGQMVYYQCVQGYRA | |
| 10/19 | LHRGPAESVCKMTHGKTRWTQPQLICTGE | |

P1846 Activatable Proprotein

| | | |
|---|---|---|
| Chains 1 | EPKSSDKTHTCPPCPAPEAAGGPSVFLFPPKPKDTLMISRTPEVTCVVVDVSH | 330 |
| and 2: | EDPEVKFNWYVDGVEVHNAKTKPREEQYNSTYRVVSVLTVLHQDWLNGKEYKC | |
| Fc(G1_AAA_C217S)_delK- | KVSNKALAAPIEKTISKAKGQPREPQVYTLPPSRDELTKNQVSLTCLVKGFYP | |
| GS- | SDIAVEWESNGQPENNYKTTPPVLDSDGSFFLYSKLTVDKSRWQQGNVFSCSV | |
| PLGLAG- | MHEALHNHYTQKSLSLSPGGSPLGLAGGSAPASSSTKKTQLQLEHLLLDLQMI | |
| GS- | LNGINNYKNPKLTRMLTFKFYMPKKATELKHLQCLEEELKPLEEALNLAPSKN | |
| L_T3A- | FHLRPRDLISNINVIVLELKGSETTFMCEYADETATIVEFLNRWITFSQSTIS | |
| GGSGGS- | TLTGGSGGSSGRSDNHGGSGGAELCDDDPPEIPHATFKAMAYKEGTMLNCECK | |
| SGRSDNH- | RGFRRIKSGSLYMLCTGASSHSSWDNQCQCTSSATRATTKQVTPQPEEQKERK | |
| GGSGGA- | TTEMQSPMQPVDQASLPGHCREPPPWENEATERIYHFVVGQMVYYQCVQGYRA | |
| R_N49A_N68A | LHRGPAESVCKMTHGKTRWTQPQLICTGE | |
| 10/19 | | |

P1847 Activatable Proprotein

| | | |
|---|---|---|
| Chains 1 | EPKSSDKTHTCPPCPAPEAAGGPSVFLFPPKPKDTLMISRTPEVTCVVVDVSH | 331 |
| and 2: | EDPEVKFNWYVDGVEVHNAKTKPREEQYNSTYRVVSVLTVLHQDWLNGKEYKC | |
| Fc(G1_AAA_C217S)_delK- | KVSNKALAAPIEKTISKAKGQPREPQVYTLPPSRDELTKNQVSLTCLVKGFYP | |
| GS- | SDIAVEWESNGQPENNYKTTPPVLDSDGSFFLYSKLTVDKSRWQQGNVFSCSV | |
| PLGLAG- | MHEALHNHYTQKSLSLSPGGSPLGLAGGSAPASSSTKKTQLQLEHLLLDLQMI | |
| GS- | LNGINNYKNPKLTRMLTFKFYMPKKATELKHLQCLEEELKPLEEVLNLAHSKN | |
| IL2_D10_T3A- | FHFDPRDVVSNINVFVLELKGSETTFMCEYADETATIVEFLNRWITFSQSIIS | |
| GGSGGS- | TLTGGSGGSSGRSDNHGGSGGAELCDDDPPEIPHATFKAMAYKEGTMLNCECK | |
| SGRSDNH- | RGFRRIKSGSLYMLCTGNSSHSSWDNQCQCTSSATRNTTKQVTPQPEEQKERK | |
| GGSGGA-R | TTEMQSPMQPVDQASLPGHCREPPPWENEATERIYHFVVGQMVYYQCVQGYRA | |
| 10/18 | LHRGPAESVCKMTHGKTRWTQPQLICTGE | |

P1848 Activatable Proprotein

| | | |
|---|---|---|
| Chains 1 | EPKSSDKTHTCPPCPAPEAAGGPSVFLFPPKPKDTLMISRTPEVTCVVVDVSH | 332 |
| and 2: | EDPEVKFNWYVDGVEVHNAKTKPREEQYNSTYRVVSVLTVLHQDWLNGKEYKC | |
| Fc(G1_AAA_C217S)_delK- | KVSNKALAAPIEKTISKAKGQPREPQVYTLPPSRDELTKNQVSLTCLVKGFYP | |
| GGS- | SDIAVEWESNGQPENNYKTTPPVLDSDGSFFLYSKLTVDKSRWQQGNVFSCSV | |
| PLGMLS- | MHEALHNHYTQKSLSLSPGGGSPLGMLSGGSAPASSSTKKTQLQLEHLLLDLQ | |
| GGS- | MILNGINNYKNPKLTRMLTFKFYMPKKATELKHLQCLEEELKPLEEALNLAPS | |
| L_T3A- | KNFHLRPRDLISNINVIVLELKGSETTFMCEYADETATIVEFLNRWITFSQST | |
| GGGGS- | ISTLTGGGGSSGRSDNHGGGAELCDDDPPEIPHATFKAMAYKEGTMLNCECKR | |
| SGRSDNH- | GFRRIKSGSLYMLCTGNSSHSSWDNQCQCTSSATRNTTKQVTPQPEEQKERKT | |
| GGGA-R | TEMQSPMQPVDQASLPGHCREPPPWENEATERIYHFVVGQMVYYQCVQGYRAL | |
| 12/16 | HRGPAESVCKMTHGKTRWTQPQLICTGE | |

P1849 Activatable Proprotein

| | | |
|---|---|---|
| Chains 1 | EPKSSDKTHTCPPCPAPEAAGGPSVFLFPPKPKDTLMISRTPEVTCVVVDVSH | 333 |
| and 2: | EDPEVKFNWYVDGVEVHNAKTKPREEQYNSTYRVVSVLTVLHQDWLNGKEYKC | |
| Fc(G1_AAA_C217S)_delK- | KVSNKALAAPIEKTISKAKGQPREPQVYTLPPSRDELTKNQVSLTCLVKGFYP | |
| GGS- | SDIAVEWESNGQPENNYKTTPPVLDSDGSFFLYSKLTVDKSRWQQGNVFSCSV | |
| PLGIAG- | MHEALHNHYTQKSLSLSPGGGSPLGIAGGGSAPASSSTKKTQLQLEHLLLDLQ | |
| GGS- | MILNGINNYKNPKLTRMLTFKFYMPKKATELKHLQCLEEELKPLEEALNLAPS | |
| L_T3A- | KNFHLRPRDLISNINVIVLELKGSETTFMCEYADETATIVEFLNRWITFSQST | |
| GGGGS- | ISTLTGGGGSSGRSDNHGGGAELCDDDPPEIPHATFKAMAYKEGTMLNCECKR | |
| SGRSDNH- | GFRRIKSGSLYMLCTGNSSHSSWDNQCQCTSSATRNTTKQVTPQPEEQKERKT | |
| GGGA-R | TEMQSPMQPVDQASLPGHCREPPPWENEATERIYHFVVGQMVYYQCVQGYRAL | |
| 12/16 | HRGPAESVCKMTHGKTRWTQPQLICTGE | |

P1850 Activatable Proprotein

| | | |
|---|---|---|
| Chains 1 | EPKSSDKTHTCPPCPAPEAAGGPSVFLFPPKPKDTLMISRTPEVTCVVVDVSH | 334 |
| and 2: | EDPEVKFNWYVDGVEVHNAKTKPREEQYNSTYRVVSVLTVLHQDWLNGKEYKC | |
| Fc(G1_AAA_C217S)_delK- | KVSNKALAAPIEKTISKAKGQPREPQVYTLPPSRDELTKNQVSLTCLVKGFYP | |
| GGS- | SDIAVEWESNGQPENNYKTTPPVLDSDGSFFLYSKLTVDKSRWQQGNVFSCSV | |
| PVGLLA- | MHEALHNHYTQKSLSLSPGGGSPVGLLAGGSAPASSSTKKTQLQLEHLLLDLQ | |
| GGS- | MILNGINNYKNPKLTRMLTFKFYMPKKATELKHLQCLEEELKPLEEALNLAPS | |
| L_T3A- | KNFHLRPRDLISNINVIVLELKGSETTFMCEYADETATIVEFLNRWITFSQST | |
| GGGGS- | ISTLTGGGGSSGRSDNHGGGAELCDDDPPEIPHATFKAMAYKEGTMLNCECKR | |
| SGRSDNH- | GFRRIKSGSLYMLCTGNSSHSSWDNQCQCTSSATRNTTKQVTPQPEEQKERKT | |
| GGGA-R | TEMQSPMQPVDQASLPGHCREPPPWENEATERIYHFVVGQMVYYQCVQGYRAL | |
| 12/16 | HRGPAESVCKMTHGKTRWTQPQLICTGE | |

P1946 Activatable Proprotein

| | | |
|---|---|---|
| Chains 1 | EPKSSDKTHTCPPCPAPELLGGPSVFLFPPKPKDTLMISRTPEVTCVVVDVSH | 335 |
| and 2: | EDPEVKFNWYVDGVEVHNAKTKPREEQYNSTYRVVSVLTVLHQDWLNGKEYKC | |
| Fc- | KVSNKALPAPIEKTISKAKGQPREPQVYTLPPSREEMTKNQVSLTCLVKGFYP | |
| stableLinker- | SDIAVEWESNGQPENNYKTTPPVLDSDGSFFLYSKLTVDKSRWQQGNVFSCSV | |
| L_wt_T3A- | MHEALHNHYTQKSLSLSPGKGGGGSGGGGSAPASSSTKKTQLQLEHLLLDLQM | |
| GSGSENLY | ILNGINNYKNPKLTRMLTFKFYMPKKATELKHLQCLEEELKPLEEVLNLAQSK | |
| FQGGSGS- | NFHLRPRDLISNINVIVLELKGSETTFMCEYADETATIVEFLNRWITFSQSII | |
| R | STLTGSGSENLYFQGGSGSELCDDDPPEIPHATFKAMAYKEGTMLNCECKRGF | |
| | RRIKSGSLYMLCTGNSSHSSWDNQCQCTSSATRNTTKQVTPQPEEQKERKTTE | |
| | MQSPMQPVDQASLPGHCREPPPWENEATERIYHFVVGQMVYYQCVQGYRALHR | |
| | GPAESVCKMTHGKTRWTQPQLICTGE | |

P1946 Cleaved proteins (Complete TEV cleavage)

| | | |
|---|---|---|
| Chains 1 | EPKSSDKTHTCPPCPAPELLGGPSVFLFPPKPKDTLMISRTPEVTCVVVDVSH | 336 |
| and 2: | EDPEVKFNWYVDGVEVHNAKTKPREEQYNSTYRVVSVLTVLHQDWLNGKEYKC | |
| Fc- | KVSNKALPAPIEKTISKAKGQPREPQVYTLPPSREEMTKNQVSLTCLVKGFYP | |
| stableLinker- | SDIAVEWESNGQPENNYKTTPPVLDSDGSFFLYSKLTVDKSRWQQGNVFSCSV | |
| L_wt_T3A- | MHEALHNHYTQKSLSLSPGKGGGGSGGGGSAPASSSTKKTQLQLEHLLLDLQM | |
| GSGSENLY | ILNGINNYKNPKLTRMLTFKFYMPKKATELKHLQCLEEELKPLEEVLNLAQSK | |
| FQ | NFHLRPRDLISNINVIVLELKGSETTFMCEYADETATIVEFLNRWITFSQSII | |
| | STLTGSGSENLYFQ | |
| Chains 3 | GGSGSELCDDDPPEIPHATFKAMAYKEGTMLNCECKRGFRRIKSGSLYMLCTG | 337 |
| and 4: | NSSHSSWDNQCQCTSSATRNTTKQVTPQPEEQKERKTTEMQSPMQPVDQASLP | |
| GGSGS-R | GHCREPPPWENEATERIYHFVVGQMVYYQCVQGYRALHRGPAESVCKMTHGKT | |
| | RWTQPQLICTGE | |

P1946 Cleaved proteins (Partial TEV cleavage)

| | | |
|---|---|---|
| Chain 1: | EPKSSDKTHTCPPCPAPELLGGPSVFLFPPKPKDTLMISRTPEVTCVVVDVSH | 338 |
| Fc- | EDPEVKFNWYVDGVEVHNAKTKPREEQYNSTYRVVSVLTVLHQDWLNGKEYKC | |
| stableLinker- | KVSNKALPAPIEKTISKAKGQPREPQVYTLPPSREEMTKNQVSLTCLVKGFYP | |
| L_wt_T3A- | SDIAVEWESNGQPENNYKTTPPVLDSDGSFFLYSKLTVDKSRWQQGNVFSCSV | |
| GSGSENLY | MHEALHNHYTQKSLSLSPGKGGGGSGGGGSAPASSSTKKTQLQLEHLLLDLQM | |
| FQGGSGS- | ILNGINNYKNPKLTRMLTFKFYMPKKATELKHLQCLEEELKPLEEVLNLAQSK | |
| R | NFHLRPRDLISNINVIVLELKGSETTFMCEYADETATIVEFLNRWITFSQSII | |
| | STLTGSGSENLYFQGGSGSELCDDDPPEIPHATFKAMAYKEGTMLNCECKRGF | |
| | RRIKSGSLYMLCTGNSSHSSWDNQCQCTSSATRNTTKQVTPQPEEQKERKTTE | |
| | MQSPMQPVDQASLPGHCREPPPWENEATERIYHFVVGQMVYYQCVQGYRALHR | |
| | GPAESVCKMTHGKTRWTQPQLICTGE | |
| Chain 2: | EPKSSDKTHTCPPCPAPELLGGPSVFLFPPKPKDTLMISRTPEVTCVVVDVSH | 339 |
| Fc- | EDPEVKFNWYVDGVEVHNAKTKPREEQYNSTYRVVSVLTVLHQDWLNGKEYKC | |
| stableLinker- | KVSNKALPAPIEKTISKAKGQPREPQVYTLPPSREEMTKNQVSLTCLVKGFYP | |
| L_wt_T3A- | SDIAVEWESNGQPENNYKTTPPVLDSDGSFFLYSKLTVDKSRWQQGNVFSCSV | |
| GSGSENLY | MHEALHNHYTQKSLSLSPGKGGGGSGGGGSAPASSSTKKTQLQLEHLLLDLQM | |
| FQ | ILNGINNYKNPKLTRMLTFKFYMPKKATELKHLQCLEEELKPLEEVLNLAQSK | |
| | NFHLRPRDLISNINVIVLELKGSETTFMCEYADETATIVEFLNRWITFSQSII | |
| | STLTGSGSENLYFQ | |
| Chain 3: | GGSGSELCDDDPPEIPHATFKAMAYKEGTMLNCECKRGFRRIKSGSLYMLCTG | 340 |
| GGSGS-R | NSSHSSWDNQCQCTSSATRNTTKQVTPQPEEQKERKTTEMQSPMQPVDQASLP | |
| | GHCREPPPWENEATERIYHFVVGQMVYYQCVQGYRALHRGPAESVCKMTHGKT | |
| | RWTQPQLICTGE | |

P1947 Activatable Proprotein

| | | |
|---|---|---|
| Chains 1 | EPKSSDKTHTCPPCPAPELLGGPSVFLFPPKPKDTLMISRTPEVTCVVVDVSH | 341 |
| and 2: | EDPEVKFNWYVDGVEVHNAKTKPREEQYNSTYRVVSVLTVLHQDWLNGKEYKC | |
| Fc- | KVSNKALPAPIEKTISKAKGQPREPQVYTLPPSREEMTKNQVSLTCLVKGFYP | |
| stableLinker- | SDIAVEWESNGQPENNYKTTPPVLDSDGSFFLYSKLTVDKSRWQQGNVFSCSV | |
| L_F42A_T3A- | MHEALHNHYTQKSLSLSPGKGGGGSGGGGSAPASSSTKKTQLQLEHLLLDLQM | |
| GSGSTEVG | ILNGINNYKNPKLTRMLTAKFYMPKKATELKHLQCLEEELKPLEEVLNLAQSK | |
| SGS-R | NFHLRPRDLISNINVIVLELKGSETTFMCEYADETATIVEFLNRWITFSQSII | |
| | STLTGSGSENLYFQGGSGSELCDDDPPEIPHATFKAMAYKEGTMLNCECKRGF | |
| | RRIKSGSLYMLCTGNSSHSSWDNQCQCTSSATRNTTKQVTPQPEEQKERKTTE | |
| | MQSPMQPVDQASLPGHCREPPPWENEATERIYHFVVGQMVYYQCVQGYRALHR | |
| | GPAESVCKMTHGKTRWTQPQLICTGE | |

P1948 Activatable Proprotein

| | | |
|---|---|---|
| Chains 1 | EPKSSDKTHTCPPCPAPELLGGPSVFLFPPKPKDTLMISRTPEVTCVVVDVSH | 342 |
| and 2: | EDPEVKFNWYVDGVEVHNAKTKPREEQYNSTYRVVSVLTVLHQDWLNGKEYKC | |
| Fc- | KVSNKALPAPIEKTISKAKGQPREPQVYTLPPSREEMTKNQVSLTCLVKGFYP | |
| stableLinker- | SDIAVEWESNGQPENNYKTTPPVLDSDGSFFLYSKLTVDKSRWQQGNVFSCSV | |
| L_Y45A_T3A- | MHEALHNHYTQKSLSLSPGKGGGGSGGGGSAPASSSTKKTQLQLEHLLLDLQM | |
| GSGSTEVG | ILNGINNYKNPKLTRMLTFKFAMPKKATELKHLQCLEEELKPLEEVLNLAQSK | |
| SGS-R | NFHLRPRDLISNINVIVLELKGSETTFMCEYADETATIVEFLNRWITFSQSII | |
| | STLTGSGSENLYFQGGSGSELCDDDPPEIPHATFKAMAYKEGTMLNCECKRGF | |
| | RRIKSGSLYMLCTGNSSHSSWDNQCQCTSSATRNTTKQVTPQPEEQKERKTTE | |
| | MQSPMQPVDQASLPGHCREPPPWENEATERIYHFVVGQMVYYQCVQGYRALHR | |
| | GPAESVCKMTHGKTRWTQPQLICTGE | |

P1949 Activatable Proprotein

| | | |
|---|---|---|
| Chains 1 | EPKSSDKTHTCPPCPAPELLGGPSVFLFPPKPKDTLMISRTPEVTCVVVDVSH | 343 |
| and 2: | EDPEVKFNWYVDGVEVHNAKTKPREEQYNSTYRVVSVLTVLHQDWLNGKEYKC | |
| Fc- | KVSNKALPAPIEKTISKAKGQPREPQVYTLPPSREEMTKNQVSLTCLVKGFYP | |
| stableLinker- | SDIAVEWESNGQPENNYKTTPPVLDSDGSFFLYSKLTVDKSRWQQGNVFSCSV | |
| L_F42A_Y45A_T3A- | MHEALHNHYTQKSLSLSPGKGGGGSGGGGSAPASSSTKKTQLQLEHLLLDLQM | |
| GSGSTEVG | ILNGINNYKNPKLTRMLTAKFAMPKKATELKHLQCLEEELKPLEEVLNLAQSK | |
| SGS-R | NFHLRPRDLISNINVIVLELKGSETTFMCEYADETATIVEFLNRWITFSQSII | |
| | STLTGSGSENLYFQGGSGSELCDDDPPEIPHATFKAMAYKEGTMLNCECKRGF | |
| | RRIKSGSLYMLCTGNSSHSSWDNQCQCTSSATRNTTKQVTPQPEEQKERKTTE | |
| | MQSPMQPVDQASLPGHCREPPPWENEATERIYHFVVGQMVYYQCVQGYRALHR | |
| | GPAESVCKMTHGKTRWTQPQLICTGE | |

P14501950 Activatable Proprotein

| | | |
|---|---|---|
| Chains 1 | DIVMTQTPLSLSVTPGQPASISCRASKSVSTSAYSYMHWYLQKPGQSPQLLIY | 344 |
| and 2: | LASNLESGVPDRFSGSGSGTDFTLKISRVEAEDVGVYYCQHSRELPYTFGQGT | |
| FAP-L1- | KLEIKRTVAAPSVFIFPPSDEQLKSGTASVVCLLNNFYPREAKVQWKVDNALQ | |
| huIgkLC | SGNSQESVTEQDSKDSTYSLSSTLTLSKADYEKHKVYACEVTHQGLSSPVTKS | |
| | FNRGEC | |
| Chains 3 | EVQLVQSGAEVKKPGESLKISCKGSGYTFTENIIHWVRQMPGKGLEWIGWFHP | 345 |
| and 4: | GSGSIKYNEKFKDQVTISADKSISTAYLQWSSLKASDTAMYFCARHGGTGRGA | |
| FAP1- | MDYWGQGTLVTVSSASTKGPSVFPLAPCSRSTSESTAALGCLVKDYFPEPVTV | |
| G4Fd- | SWNSGALTSGVHTFPAVLQSSGLYSLSSVVTVPSSSLGTKTYTCNVDHKPSNT | |
| Fc(G1_AAA_C217S)_delK- | KVDKRVESKY | |
| GGSPLGLA | EPKSSDKTHTCPPCPAPEAAGGPSVFLFPPKPKDTLMISRTPEVTCVVVDVSH | |
| GGGS- | EDPEVKFNWYVDGVEVHNAKTKPREEQYNSTYRVVSVLTVLHQDWLNGKEYKC | |
| L_T3A- | KVSNKALAAPIEKTISKAKGQPREPQVYTLPPSRDELTKNQVSLTCLVKGFYP | |
| GGSGGGSG | SDIAVEWESNGQPENNYKTTPPVLDSDGSFFLYSKLTVDKSRWQQGNVFSCSV | |
| GGSGGGA- | MHEALHNHYTQKSLSLSPGGGSPLGLAGGGSAPASSSTKKTQLQLEHLLLDLQ | |
| R 12/15 | MILNGINNYKNPKLTRMLTFKFYMPKKATELKHLQCLEEELKPLEEALNLAPS | |
| | KNFHLRPRDLISNINVIVLELKGSETTFMCEYADETATIVEFLNRWITFSQST | |
| | ISTLTGGSGGGSGGGSGGGAELCDDDPPEIPHATFKAMAYKEGTMLNCECKRG | |
| | FRRIKSGSLYMLCTGNSSHSSWDNQCQCTSSATRNTTKQVTPQPEEQKERKTT | |
| | EMQSPMQPVDQASLPGHCREPPPWENEATERIYHFVVGQMVYYQCVQGYRALH | |
| | RGPAESVCKMTHGKTRWTQPQLICTGE | |

P14501950 Cleaved proteins (Complete MMP-2/MMP-9 cleavage)

| | | |
|---|---|---|
| Chains 1 | DIVMTQTPLSLSVTPGQPASISCRASKSVSTSAYSYMHWYLQKPGQSPQLLIY | 346 |
| and 2: | LASNLESGVPDRFSGSGSGTDFTLKISRVEAEDVGVYYCQHSRELPYTFGQGT | |
| FAP-L1- | KLEIKRTVAAPSVFIFPPSDEQLKSGTASVVCLLNNFYPREAKVQWKVDNALQ | |
| huIgkLC | SGNSQESVTEQDSKDSTYSLSSTLTLSKADYEKHKVYACEVTHQGLSSPVTKS | |
| | FNRGEC | |
| Chains 3 | EVQLVQSGAEVKKPGESLKISCKGSGYTFTENIIHWVRQMPGKGLEWIGWFHP | 347 |
| and 4: | GSGSIKYNEKFKDQVTISADKSISTAYLQWSSLKASDTAMYFCARHGGTGRGA | |
| FAP1- | MDYWGQGTLVTVSSASTKGPSVFPLAPCSRSTSESTAALGCLVKDYFPEPVTV | |
| G4Fd- | SWNSGALTSGVHTFPAVLQSSGLYSLSSVVTVPSSSLGTKTYTCNVDHKPSNT | |
| Fc(G1_AAA_C217S)_delK- | KVDKRVESKYEPKSSDKTHTCPPCPAPEAAGGPSVFLFPPKPKDTLMISRTPE | |
| GGSPLG | VTCVVVDVSHEDPEVKFNWYVDGVEVHNAKTKPREEQYNSTYRVVSVLTVLHQ | |
| | DWLNGKEYKCKVSNKALAAPIEKTISKAKGQPREPQVYTLPPSRDELTKNQVS | |
| | LTCLVKGFYPSDIAVEWESNGQPENNYKTTPPVLDSDGSFFLYSKLTVDKSRW | |
| | QQGNVFSCSVMHEALHNHYTQKSLSLSPGGGSPLG | |
| Chains 5 | LAGGGSAPASSSTKKTQLQLEHLLLDLQMILNGINNYKNPKLTRMLTFKFYMP | 348 |
| and 6: | KKATELKHLQCLEEELKPLEEALNLAPSKNFHLRPRDLISNINVIVLELKGSE | |
| LAGGGS- | TTFMCEYADETATIVEFLNRWITFSQSTISTLTGGSGGGSGGGSGGGAELCDD | |
| L_T3A- | DPPEIPHATFKAMAYKEGTMLNCECKRGFRRIKSGSLYMLCTGNSSHSSWDNQ | |
| GGSGGGSG | CQCTSSATRNTTKQVTPQPEEQKERKTTEMQSPMQPVDQASLPGHCREPPPWE | |
| GGSGGGA- | NEATERIYHFVVGQMVYYQCVQGYRALHRGPAESVCKMTHGKTRWTQPQLICT | |
| R | GE | |

P14501950 Cleaved proteins (Partial MMP-2/MMP-9 cleavage)

| | | |
|---|---|---|
| Chains 1 | DIVMTQTPLSLSVTPGQPASISCRASKSVSTSAYSYMHWYLQKPGQSPQLLIY | 349 |
| and 2: | LASNLESGVPDRFSGSGSGTDFTLKISRVEAEDVGVYYCQHSRELPYTFGQGT | |
| FAP-L1- | KLEIKRTVAAPSVFIFPPSDEQLKSGTASVVCLLNNFYPREAKVQWKVDNALQ | |
| huIgkLC | SGNSQESVTEQDSKDSTYSLSSTLTLSKADYEKHKVYACEVTHQGLSSPVTKS | |
| | FNRGEC | |
| Chain 3: | EVQLVQSGAEVKKPGESLKISCKGSGYTFTENIIHWVRQMPGKGLEWIGWFHP | 350 |
| FAP1- | GSGSIKYNEKFKDQVTISADKSISTAYLQWSSLKASDTAMYFCARHGGTGRGA | |
| G4Fd- | MDYWGQGTLVTVSSASTKGPSVFPLAPCSRSTSESTAALGCLVKDYFPEPVTV | |
| Fc(G1_AAA_C217S)_delK- | SWNSGALTSGVHTFPAVLQSSGLYSLSSVVTVPSSSLGTKTYTCNVDHKPSNT | |
| GGSPLGLA | KVDKRVESKYEPKSSDKTHTCPPCPAPEAAGGPSVFLFPPKPKDTLMISRTPE | |
| GGGS- | VTCVVVDVSHEDPEVKFNWYVDGVEVHNAKTKPREEQYNSTYRVVSVLTVLHQ | |
| L_T3A- | DWLNGKEYKCKVSNKALAAPIEKTISKAKGQPREPQVYTLPPSRDELTKNQVS | |
| GGSGGGSG | LTCLVKGFYPSDIAVEWESNGQPENNYKTTPPVLDSDGSFFLYSKLTVDKSRW | |
| GGSGGGA- | QQGNVFSCSVMHEALHNHYTQKSLSLSPGGGSPLGLAGGGSAPASSSTKKTQL | |
| R | QLEHLLLDLQMILNGINNYKNPKLTRMLTFKFYMPKKATELKHLQCLEEELKP | |
| | LEEALNLAPSKNFHLRPRDLISNINVIVLELKGSETTFMCEYADETATIVEFL | |
| | NRWITFSQSTISTLTGGSGGGSGGGSGGGAELCDDDPPEIPHATFKAMAYKEG | |
| | TMLNCECKRGFRRIKSGSLYMLCTGNSSHSSWDNQCQCTSSATRNTTKQVTPQ | |
| | PEEQKERKTTEMQSPMQPVDQASLPGHCREPPPWENEATERIYHFVVGQMVYY | |
| | QCVQGYRALHRGPAESVCKMTHGKTRWTQPQLICTGE | |
| Chain 4: | EVQLVQSGAEVKKPGESLKISCKGSGYTFTENIIHWVRQMPGKGLEWIGWFHP | 351 |
| FAP1- | GSGSIKYNEKFKDQVTISADKSISTAYLQWSSLKASDTAMYFCARHGGTGRGA | |
| G4Fd- | MDYWGQGTLVTVSSASTKGPSVFPLAPCSRSTSESTAALGCLVKDYFPEPVTV | |
| Fc(G1_AAA_C217S)_delK- | SWNSGALTSGVHTFPAVLQSSGLYSLSSVVTVPSSSLGTKTYTCNVDHKPSNT | |
| GGSPLG | KVDKRVESKY | |
| | EPKSSDKTHTCPPCPAPEAAGGPSVFLFPPKPKDTLMISRTPEVTCVVVDVSH | |
| | EDPEVKFNWYVDGVEVHNAKTKPREEQYNSTYRVVSVLTVLHQDWLNGKEYKC | |
| | KVSNKALAAPIEKTISKAKGQPREPQVYTLPPSRDELTKNQVSLTCLVKGFYP | |
| | SDIAVEWESNGQPENNYKTTPPVLDSDGSFFLYSKLTVDKSRWQQGNVFSCSV | |
| | MHEALHNHYTQKSLSLSPGGGSPLG | |
| Chain 5: | LAGGGSAPASSSTKKTQLQLEHLLLDLQMILNGINNYKNPKLTRMLTFKFYMP | 352 |
| LAGGGS- | KKATELKHLQCLEEELKPLEEALNLAPSKNFHLRPRDLISNINVIVLELKGSE | |
| L_T3A- | TTFMCEYADETATIVEFLNRWITFSQSTISTLTGGSGGGSGGGSGGGAELCDD | |
| GGSGGGSG | DPPEIPHATFKAMAYKEGTMLNCECKRGFRRIKSGSLYMLCTGNSSHSSWDNQ | |
| GGSGGGA- | CQCTSSATRNTTKQVTPQPEEQKERKTTEMQSPMQPVDQASLPGHCREPPPWE | |
| R | NEATERIYHFVVGQMVYYQCVQGYRALHRGPAESVCKMTHGKTRWTQPQLICT | |
| | GE | |

P14501951 Activatable Proprotein

| | | |
|---|---|---|
| Chains 1 | DIVMTQTPLSLSVTPGQPASISCRASKSVSTSAYSYMHWYLQKPGQSPQLLIY | 353 |
| and 2: | LASNLESGVPDRFSGSGSGTDFTLKISRVEAEDVGVYYCQHSRELPYTFGQGT | |
| FAP-L1- | KLEIKRTVAAPSVFIFPPSDEQLKSGTASVVCLLNNFYPREAKVQWKVDNALQ | |
| huIgkLC | SGNSQESVTEQDSKDSTYSLSSTLTLSKADYEKHKVYACEVTHQGLSSPVTKS | |
| | FNRGEC | |
| Chains 3 | EVQLVQSGAEVKKPGESLKISCKGSGYTFTENIIHWVRQMPGKGLEWIGWFHP | 354 |
| and 4: | GSGSIKYNEKFKDQVTISADKSISTAYLQWSSLKASDTAMYFCARHGGTGRGA | |
| FAP1- | MDYWGQGTLVTVSSASTKGPSVFPLAPCSRSTSESTAALGCLVKDYFPEPVTV | |
| G4Fd- | SWNSGALTSGVHTFPAVLQSSGLYSLSSVVTVPSSSLGTKTYTCNVDHKPSNT | |
| Fc(G1_AAA_C217S)_delK- | KVDKRVESKY | |
| GGSGRSDN | EPKSSDKTHTCPPCPAPEAAGGPSVFLFPPKPKDTLMISRTPEVTCVVVDVSH | |
| HGGA- | EDPEVKFNWYVDGVEVHNAKTKPREEQYNSTYRVVSVLTVLHQDWLNGKEYKC | |
| L_T3A- | KVSNKALAAPIEKTISKAKGQPREPQVYTLPPSRDELTKNQVSLTCLVKGFYP | |
| GGSGGGSG | SDIAVEWESNGQPENNYKTTPPVLDSDGSFFLYSKLTVDKSRWQQGNVFSCSV | |
| GGSGGGA- | MHEALHNHYTQKSLSLSPGGGSGRSDNHGGAAPASSSTKKTQLQLEHLLLDLQ | |
| R 12/15 | MILNGINNYKNPKLTRMLTFKFYMPKKATELKHLQCLEEELKPLEEALNLAPS | |
| | KNFHLRPRDLISNINVIVLELKGSETTFMCEYADETATIVEFLNRWITFSQST | |
| | ISTLTGGSGGGSGGGSGGGAELCDDDPPEIPHATFKAMAYKEGTMLNCECKRG | |
| | FRRIKSGSLYMLCTGNSSHSSWDNQCQCTSSATRNTTKQVTPQPEEQKERKTT | |
| | EMQSPMQPVDQASLPGHCREPPPWENEATERIYHFVVGQMVYYQCVQGYRALH | |
| | RGPAESVCKMTHGKTRWTQPQLICTGE | |

P14501951 Cleaved proteins (Complete uPA/Matriptase cleavage)

| | | |
|---|---|---|
| Chains 1 | DIVMTQTPLSLSVTPGQPASISCRASKSVSTSAYSYMHWYLQKPGQSPQLLIY | 355 |
| and 2: | LASNLESGVPDRFSGSGSGTDFTLKISRVEAEDVGVYYCQHSRELPYTFGQGT | |
| FAP-L1- | KLEIKRTVAAPSVFIFPPSDEQLKSGTASVVCLLNNFYPREAKVQWKVDNALQ | |
| huIgkLC | SGNSQESVTEQDSKDSTYSLSSTLTLSKADYEKHKVYACEVTHQGLSSPVTKS | |
| | FNRGEC | |
| Chains 3 | EVQLVQSGAEVKKPGESLKISCKGSGYTFTENIIHWVRQMPGKGLEWIGWFHP | 356 |
| and 4: | GSGSIKYNEKFKDQVTISADKSISTAYLQWSSLKASDTAMYFCARHGGTGRGA | |
| FAP1- | MDYWGQGTLVTVSSASTKGPSVFPLAPCSRSTSESTAALGCLVKDYFPEPVTV | |
| G4Fd- | SWNSGALTSGVHTFPAVLQSSGLYSLSSVVTVPSSSLGTKTYTCNVDHKPSNT | |
| Fc(G1_AAA_C217S)_delK- | KVDKRVESKYEPKSSDKTHTCPPCPAPEAAGGPSVFLFPPKPKDTLMISRTPE | |
| GGSGR | VTCVVVDVSHEDPEVKFNWYVDGVEVHNAKTKPREEQYNSTYRVVSVLTVLHQ | |
| | DWLNGKEYKCKVSNKALAAPIEKTISKAKGQPREPQVYTLPPSRDELTKNQVS | |
| | LTCLVKGFYPSDIAVEWESNGQPENNYKTTPPVLDSDGSFFLYSKLTVDKSRW | |
| | QQGNVFSCSVMHEALHNHYTQKSLSLSPGGGSGR | |
| Chains 5 | SDNHGGAAPASSSTKKTQLQLEHLLLDLQMILNGINNYKNPKLTRMLTFKFYM | 357 |
| and 6: | PKKATELKHLQCLEEELKPLEEALNLAPSKNFHLRPRDLISNINVIVLELKGS | |
| SDNHGGA- | ETTFMCEYADETATIVEFLNRWITFSQSTISTLTGGSGGGSGGGSGGGAELCD | |
| L_T3A- | DDPPEIPHATFKAMAYKEGTMLNCECKRGFRRIKSGSLYMLCTGNSSHSSWDN | |
| GGSGGGSG | QCQCTSSATRNTTKQVTPQPEEQKERKTTEMQSPMQPVDQASLPGHCREPPPW | |
| GGSGGGA- | ENEATERIYHFVVGQMVYYQCVQGYRALHRGPAESVCKMTHGKTRWTQPQLIC | |
| R | TGE | |

P14501951 Cleaved proteins (Partial uPA/Matriptase cleavage)

| | | |
|---|---|---|
| Chains 1 | DIVMTQTPLSLSVTPGQPASISCRASKSVSTSAYSYMHWYLQKPGQSPQLLIY | 358 |
| and 2: | LASNLESGVPDRFSGSGSGTDFTLKISRVEAEDVGVYYCQHSRELPYTFGQGT | |
| FAP-L1- | KLEIKRTVAAPSVFIFPPSDEQLKSGTASVVCLLNNFYPREAKVQWKVDNALQ | |
| huIgkLC | SGNSQESVTEQDSKDSTYSLSSTLTLSKADYEKHKVYACEVTHQGLSSPVTKS | |
| | FNRGEC | |
| Chain 3: | EVQLVQSGAEVKKPGESLKISCKGSGYTFTENIIHWVRQMPGKGLEWIGWFHP | 359 |
| FAP1- | GSGSIKYNEKFKDQVTISADKSISTAYLQWSSLKASDTAMYFCARHGGTGRGA | |
| G4Fd- | MDYWGQGTLVTVSSASTKGPSVFPLAPCSRSTSESTAALGCLVKDYFPEPVTV | |
| Fc(G1_AAA_C217S)_delK- | SWNSGALTSGVHTFPAVLQSSGLYSLSSVVTVPSSSLGTKTYTCNVDHKPSNT | |
| GGSGRSDN | KVDKRVESKYEPKSSDKTHTCPPCPAPEAAGGPSVFLFPPKPKDTLMISRTPE | |
| HGGA- | VTCVVVDVSHEDPEVKFNWYVDGVEVHNAKTKPREEQYNSTYRVVSVLTVLHQ | |
| L_T3A- | DWLNGKEYKCKVSNKALAAPIEKTISKAKGQPREPQVYTLPPSRDELTKNQVS | |
| GGSGGGSG | LTCLVKGFYPSDIAVEWESNGQPENNYKTTPPVLDSDGSFFLYSKLTVDKSRW | |
| GGSGGGA- | QQGNVFSCSVMHEALHNHYTQKSLSLSPGGGSGRSDNHGGAAPASSSTKKTQL | |
| R | QLEHLLLDLQMILNGINNYKNPKLTRMLTFKFYMPKKATELKHLQCLEEELKP | |
| | LEEALNLAPSKNFHLRPRDLISNINVIVLELKGSETTFMCEYADETATIVEFL | |
| | NRWITFSQSTISTLTGGSGGGSGGGSGGGAELCDDDPPEIPHATFKAMAYKEG | |
| | TMLNCECKRGFRRIKSGSLYMLCTGNSSHSSWDNQCQCTSSATRNTTKQVTPQ | |
| | PEEQKERKTTEMQSPMQPVDQASLPGHCREPPPWENEATERIYHFVVGQMVYY | |
| | QCVQGYRALHRGPAESVCKMTHGKTRWTQPQLICTGE | |
| Chain 4: | EVQLVQSGAEVKKPGESLKISCKGSGYTFTENIIHWVRQMPGKGLEWIGWFHP | 360 |
| FAP1- | GSGSIKYNEKFKDQVTISADKSISTAYLQWSSLKASDTAMYFCARHGGTGRGA | |
| G4Fd- | MDYWGQGTLVTVSSASTKGPSVFPLAPCSRSTSESTAALGCLVKDYFPEPVTV | |
| Fc(G1_AAA_C217S)_delK- | SWNSGALTSGVHTFPAVLQSSGLYSLSSVVTVPSSSLGTKTYTCNVDHKPSNT | |
| GGSGR | KVDKRVESKY | |
| | EPKSSDKTHTCPPCPAPEAAGGPSVFLFPPKPKDTLMISRTPEVTCVVVDVSH | |
| | EDPEVKFNWYVDGVEVHNAKTKPREEQYNSTYRVVSVLTVLHQDWLNGKEYKC | |
| | KVSNKALAAPIEKTISKAKGQPREPQVYTLPPSRDELTKNQVSLTCLVKGFYP | |
| | SDIAVEWESNGQPENNYKTTPPVLDSDGSFFLYSKLTVDKSRWQQGNVFSCSV | |
| | MHEALHNHYTQKSLSLSPGGGSGR | |
| Chain 5: | SDNHGGAAPASSSTKKTQLQLEHLLLDLQMILNGINNYKNPKLTRMLTFKFYM | 361 |
| SDNHGGA- | PKKATELKHLQCLEEELKPLEEALNLAPSKNFHLRPRDLISNINVIVLELKGS | |
| L_T3A- | ETTFMCEYADETATIVEFLNRWITFSQSTISTLTGGSGGGSGGGSGGGAELCD | |
| GGSGGGSG | DDPPEIPHATFKAMAYKEGTMLNCECKRGFRRIKSGSLYMLCTGNSSHSSWDN | |
| GGSGGGA- | QCQCTSSATRNTTKQVTPQPEEQKERKTTEMQSPMQPVDQASLPGHCREPPPW | |
| R | ENEATERIYHFVVGQMVYYQCVQGYRALHRGPAESVCKMTHGKTRWTQPQLIC | |
| | TGE | |

P14501951 Cleaved proteins (Complete Legumain cleavage)

| | | |
|---|---|---|
| Chains 1 | DIVMTQTPLSLSVTPGQPASISCRASKSVSTSAYSYMHWYLQKPGQSPQLLIY | 362 |
| and 2: | LASNLESGVPDRFSGSGSGTDFTLKISRVEAEDVGVYYCQHSRELPYTFGQGT | |
| FAP-L1- | KLEIKRTVAAPSVFIFPPSDEQLKSGTASVVCLLNNFYPREAKVQWKVDNALQ | |
| huIgkLC | SGNSQESVTEQDSKDSTYSLSSTLTLSKADYEKHKVYACEVTHQGLSSPVTKS | |
| | FNRGEC | |
| Chains 3 | EVQLVQSGAEVKKPGESLKISCKGSGYTFTENIIHWVRQMPGKGLEWIGWFHP | 363 |
| and 4: | GSGSIKYNEKFKDQVTISADKSISTAYLQWSSLKASDTAMYFCARHGGTGRGA | |
| FAP1- | MDYWGQGTLVTVSSASTKGPSVFPLAPCSRSTSESTAALGCLVKDYFPEPVTV | |
| G4Fd- | SWNSGALTSGVHTFPAVLQSSGLYSLSSVVTVPSSSLGTKTYTCNVDHKPSNT | |
| Fc(G1_AAA_C217S)_delK- | KVDKRVESKYEPKSSDKTHTCPPCPAPEAAGGPSVFLFPPKPKDTLMISRTPE | |
| GGSGRSDN | VTCVVVDVSHEDPEVKFNWYVDGVEVHNAKTKPREEQYNSTYRVVSVLTVLHQ | |
| | DWLNGKEYKCKVSNKALAAPIEKTISKAKGQPREPQVYTLPPSRDELTKNQVS | |
| | LTCLVKGFYPSDIAVEWESNGQPENNYKTTPPVLDSDGSFFLYSKLTVDKSRW | |
| | QQGNVFSCSVMHEALHNHYTQKSLSLSPGGGSGRSDN | |
| Chains 5 | HGGAAPASSSTKKTQLQLEHLLLDLQMILNGINNYKNPKLTRMLTFKFYMPKK | 364 |
| and 6: | ATELKHLQCLEEELKPLEEALNLAPSKNFHLRPRDLISNINVIVLELKGSETT | |
| HGGA- | FMCEYADETATIVEFLNRWITFSQSTISTLTGGSGGGSGGGSGGGAELCDDDP | |
| L_T3A- | PEIPHATFKAMAYKEGTMLNCECKRGFRRIKSGSLYMLCTGNSSHSSWDNQCQ | |
| GGSGGGSG | CTSSATRNTTKQVTPQPEEQKERKTTEMQSPMQPVDQASLPGHCREPPPWENE | |
| GGSGGGA- | ATERIYHFVVGQMVYYQCVQGYRALHRGPAESVCKMTHGKTRWTQPQLICTGE | |
| R | | |

P14501951 Cleaved proteins (Partial Legumain cleavage)

| | | |
|---|---|---|
| Chains 1 | DIVMTQTPLSLSVTPGQPASISCRASKSVSTSAYSYMHWYLQKPGQSPQLLIY | 365 |
| and 2: | LASNLESGVPDRFSGSGSGTDFTLKISRVEAEDVGVYYCQHSRELPYTFGQGT | |
| FAP-L1- | KLEIKRTVAAPSVFIFPPSDEQLKSGTASVVCLLNNFYPREAKVQWKVDNALQ | |
| huIgkLC | SGNSQESVTEQDSKDSTYSLSSTLTLSKADYEKHKVYACEVTHQGLSSPVTKS | |
| | FNRGEC | |
| Chain 3: | EVQLVQSGAEVKKPGESLKISCKGSGYTFTENIIHWVRQMPGKGLEWIGWFHP | 366 |
| FAP1- | GSGSIKYNEKFKDQVTISADKSISTAYLQWSSLKASDTAMYFCARHGGTGRGA | |
| G4Fd- | MDYWGQGTLVTVSSASTKGPSVFPLAPCSRSTSESTAALGCLVKDYFPEPVTV | |
| Fc(G1_AAA_C217S)_delK- | SWNSGALTSGVHTFPAVLQSSGLYSLSSVVTVPSSSLGTKTYTCNVDHKPSNT | |
| GGSGRSDN | KVDKRVESKY | |
| HGGA- | EPKSSDKTHTCPPCPAPEAAGGPSVFLFPPKPKDTLMISRTPEVTCVVVDVSH | |
| L_T3A- | EDPEVKFNWYVDGVEVHNAKTKPREEQYNSTYRVVSVLTVLHQDWLNGKEYKC | |
| GGSGGGSG | KVSNKALAAPIEKTISKAKGQPREPQVYTLPPSRDELTKNQVSLTCLVKGFYP | |
| GGSGGGA- | SDIAVEWESNGQPENNYKTTPPVLDSDGSFFLYSKLTVDKSRWQQGNVFSCSV | |
| R | MHEALHNHYTQKSLSLSPGGGSGRSDNHGGAAPASSSTKKTQLQLEHLLLDLQ | |
| | MILNGINNYKNPKLTRMLTFKFYMPKKATELKHLQCLEEELKPLEEALNLAPS | |
| | KNFHLRPRDLISNINVIVLELKGSETTFMCEYADETATIVEFLNRWITFSQST | |
| | ISTLTGGSGGGSGGGSGGGAELCDDDPPEIPHATFKAMAYKEGTMLNCECKRG | |
| | FRRIKSGSLYMLCTGNSSHSSWDNQCQCTSSATRNTTKQVTPQPEEQKERKTT | |
| | EMQSPMQPVDQASLPGHCREPPPWENEATERIYHFVVGQMVYYQCVQGYRALH | |
| | RGPAESVCKMTHGKTRWTQPQLICTGE | |
| Chain 4: | EVQLVQSGAEVKKPGESLKISCKGSGYTFTENIIHWVRQMPGKGLEWIGWFHP | 367 |
| FAP1- | GSGSIKYNEKFKDQVTISADKSISTAYLQWSSLKASDTAMYFCARHGGTGRGA | |
| G4Fd- | MDYWGQGTLVTVSSASTKGPSVFPLAPCSRSTSESTAALGCLVKDYFPEPVTV | |
| Fc(G1_AAA_C217S)_delK- | SWNSGALTSGVHTFPAVLQSSGLYSLSSVVTVPSSSLGTKTYTCNVDHKPSNT | |
| GGSGRSDN | KVDKRVESKY | |
| | EPKSSDKTHTCPPCPAPEAAGGPSVFLFPPKPKDTLMISRTPEVTCVVVDVSH | |
| | EDPEVKFNWYVDGVEVHNAKTKPREEQYNSTYRVVSVLTVLHQDWLNGKEYKC | |
| | KVSNKALAAPIEKTISKAKGQPREPQVYTLPPSRDELTKNQVSLTCLVKGFYP | |
| | SDIAVEWESNGQPENNYKTTPPVLDSDGSFFLYSKLTVDKSRWQQGNVFSCSV | |
| | MHEALHNHYTQKSLSLSPGGGSGRSDN | |
| Chain 5: | HGGAAPASSSTKKTQLQLEHLLLDLQMILNGINNYKNPKLTRMLTFKFYMPKK | 368 |
| HGGA- | ATELKHLQCLEEELKPLEEALNLAPSKNFHLRPRDLISNINVIVLELKGSETT | |
| L_T3A- | FMCEYADETATIVEFLNRWITFSQSTISTLTGGSGGGSGGGSGGGAELCDDDP | |
| GGSGGGSG | PEIPHATFKAMAYKEGTMLNCECKRGFRRIKSGSLYMLCTGNSSHSSWDNQCQ | |
| GGSGGGA- | CTSSATRNTTKQVTPQPEEQKERKTTEMQSPMQPVDQASLPGHCREPPPWENE | |
| R | ATERIYHFVVGQMVYYQCVQGYRALHRGPAESVCKMTHGKTRWTQPQLICTGE | |

P14501952 Activatable Proprotein

| | | |
|---|---|---|
| Chains 1 | DIVMTQTPLSLSVTPGQPASISCRASKSVSTSAYSYMHWYLQKPGQSPQLLIY | 369 |
| and 2: | LASNLESGVPDRFSGSGSGTDFTLKISRVEAEDVGVYYCQHSRELPYTFGQGT | |
| FAP-L1- | KLEIKRTVAAPSVFIFPPSDEQLKSGTASVVCLLNNFYPREAKVQWKVDNALQ | |
| huIgkLC | SGNSQESVTEQDSKDSTYSLSSTLTLSKADYEKHKVYACEVTHQGLSSPVTKS | |
| | FNRGEC | |
| Chains 3 | EVQLVQSGAEVKKPGESLKISCKGSGYTFTENIIHWVRQMPGKGLEWIGWFHP | 370 |
| and 4: | GSGSIKYNEKFKDQVTISADKSISTAYLQWSSLKASDTAMYFCARHGGTGRGA | |
| FAP1- | MDYWGQGTLVTVSSASTKGPSVFPLAPCSRSTSESTAALGCLVKDYFPEPVTV | |
| G4Fd- | SWNSGALTSGVHTFPAVLQSSGLYSLSSVVTVPSSSLGTKTYTCNVDHKPSNT | |
| Fc(G1_AA | KVDKRVESKYEPKSSDKTHTCPPCPAPEAAGGPSVFLFPPKPKDTLMISRTPE | |
| A_C217S) | VTCVVVDVSHEDPEVKFNWYVDGVEVHNAKTKPREEQYNSTYRVVSVLTVLHQ | |
| _delK- | DWLNGKEYKCKVSNKALAAPIEKTISKAKGQPREPQVYTLPPSRDELTKNQVS | |
| GGSGGSGG | LTCLVKGFYPSDIAVEWESNGQPENNYKTTPPVLDSDGSFFLYSKLTVDKSRW | |
| SGGS- | QQGNVFSCSVMHEALHNHYTQKSLSLSPGGGSGGSGGSGGSAPASSSTKKTQL | |
| L_T3A- | QLEHLLLDLQMILNGINNYKNPKLTRMLTFKFYMPKKATELKHLQCLEEELKP | |
| GGSGGGPL | LEEALNLAPSKNFHLRPRDLISNINVIVLELKGSETTFMCEYADETATIVEFL | |
| GLAGGGA- | NRWITFSQSTISTLTGGSGGGPLGLAGGGAELCDDDPPEIPHATFKAMAYKEG | |
| R 12/15 | TMLNCECKRGFRRIKSGSLYMLCTGNSSHSSWDNQCQCTSSATRNTTKQVTPQ | |
| | PEEQKERKTTEMQSPMQPVDQASLPGHCREPPPWENEATERIYHFVVGQMVYY | |
| | QCVQGYRALHRGPAESVCKMTHGKTRWTQPQLICTGE | |

P14501952 Cleaved proteins (Complete MMP-2/MMP-9 cleavage)

| | | |
|---|---|---|
| Chains 1 | DIVMTQTPLSLSVTPGQPASISCRASKSVSTSAYSYMHWYLQKPGQSPQLLIY | 371 |
| and 2: | LASNLESGVPDRFSGSGSGTDFTLKISRVEAEDVGVYYCQHSRELPYTFGQGT | |
| FAP-L1- | KLEIKRTVAAPSVFIFPPSDEQLKSGTASVVCLLNNFYPREAKVQWKVDNALQ | |
| huIgkLC | SGNSQESVTEQDSKDSTYSLSSTLTLSKADYEKHKVYACEVTHQGLSSPVTKS | |
| | FNRGEC | |
| Chains 3 | EVQLVQSGAEVKKPGESLKISCKGSGYTFTENIIHWVRQMPGKGLEWIGWFHP | 372 |
| and 4: | GSGSIKYNEKFKDQVTISADKSISTAYLQWSSLKASDTAMYFCARHGGTGRGA | |
| FAP1- | MDYWGQGTLVTVSSASTKGPSVFPLAPCSRSTSESTAALGCLVKDYFPEPVTV | |
| G4Fd- | SWNSGALTSGVHTFPAVLQSSGLYSLSSVVTVPSSSLGTKTYTCNVDHKPSNT | |
| Fc(G1_AAA_C217S)_delK- | KVDKRVESKY | |
| GGSGGSGG | EPKSSDKTHTCPPCPAPEAAGGPSVFLFPPKPKDTLMISRTPEVTCVVVDVSH | |
| SGGS- | EDPEVKFNWYVDGVEVHNAKTKPREEQYNSTYRVVSVLTVLHQDWLNGKEYKC | |
| L_T3A- | KVSNKALAAPIEKTISKAKGQPREPQVYTLPPSRDELTKNQVSLTCLVKGFYP | |
| GGSGGGPL | SDIAVEWESNGQPENNYKTTPPVLDSDGSFFLYSKLTVDKSRWQQGNVFSCSV | |
| G | MHEALHNHYTQKSLSLSPGGGSGGSGGSGGSAPASSSTKKTQLQLEHLLLDLQ | |
| | MILNGINNYKNPKLTRMLTFKFYMPKKATELKHLQCLEEELKPLEEALNLAPS | |
| | KNFHLRPRDLISNINVIVLELKGSETTFMCEYADETATIVEFLNRWITFSQST | |
| | ISTLTGGSGGGPLG | |
| Chains 5 | LAGGGAELCDDDPPEIPHATFKAMAYKEGTMLNCECKRGFRRIKSGSLYMLCT | 373 |
| and 6: | GNSSHSSWDNQCQCTSSATRNTTKQVTPQPEEQKERKTTEMQSPMQPVDQASL | |
| LAGGGA-R | PGHCREPPPWENEATERIYHFVVGQMVYYQCVQGYRALHRGPAESVCKMTHGK | |
| | TRWTQPQLICTGE | |

P14501952 Cleaved proteins (Partial MMP-2/MMP-9 cleavage)

| | | |
|---|---|---|
| Chains 1 | DIVMTQTPLSLSVTPGQPASISCRASKSVSTSAYSYMHWYLQKPGQSPQLLIY | 374 |
| and 2: | LASNLESGVPDRFSGSGSGTDFTLKISRVEAEDVGVYYCQHSRELPYTFGQGT | |
| FAP-L1- | KLEIKRTVAAPSVFIFPPSDEQLKSGTASVVCLLNNFYPREAKVQWKVDNALQ | |
| huIgkLC | SGNSQESVTEQDSKDSTYSLSSTLTLSKADYEKHKVYACEVTHQGLSSPVTKS | |
| | FNRGEC | |
| Chain 3: | EVQLVQSGAEVKKPGESLKISCKGSGYTFTENIIHWVRQMPGKGLEWIGWFHP | 375 |
| FAP1- | GSGSIKYNEKFKDQVTISADKSISTAYLQWSSLKASDTAMYFCARHGGTGRGA | |
| G4Fd- | MDYWGQGTLVTVSSASTKGPSVFPLAPCSRSTSESTAALGCLVKDYFPEPVTV | |
| Fc(G1_AA | SWNSGALTSGVHTFPAVLQSSGLYSLSSVVTVPSSSLGTKTYTCNVDHKPSNT | |
| A_C217S) | KVDKRVESKYEPKSSDKTHTCPPCPAPEAAGGPSVFLFPPKPKDTLMISRTPE | |
| del K- | VTCVVVDVSHEDPEVKFNWYVDGVEVHNAKTKPREEQYNSTYRVVSVLTVLHQ | |
| GGSGGSGG | DWLNGKEYKCKVSNKALAAPIEKTISKAKGQPREPQVYTLPPSRDELTKNQVS | |
| SGGS- | LTCLVKGFYPSDIAVEWESNGQPENNYKTTPPVLDSDGSFFLYSKLTVDKSRW | |
| L_T3A- | QQGNVFSCSVMHEALHNHYTQKSLSLSPGGGSGGSGGSGGSAPASSSTKKTQL | |
| GGSGGGPL | QLEHLLLDLQMILNGINNYKNPKLTRMLTFKFYMPKKATELKHLQCLEEELKP | |
| GLAGGGA- | LEEALNLAPSKNFHLRPRDLISNINVIVLELKGSETTFMCEYADETATIVEFL | |
| R | NRWITFSQSTISTLTGGSGGGPLGLAGGGAELCDDDPPEIPHATFKAMAYKEG | |
| | TMLNCECKRGFRRIKSGSLYMLCTGNSSHSSWDNQCQCTSSATRNTTKQVTPQ | |
| | PEEQKERKTTEMQSPMQPVDQASLPGHCREPPPWENEATERIYHFVVGQMVYY | |
| | QCVQGYRALHRGPAESVCKMTHGKTRWTQPQLICTGE | |
| Chain 4: | EVQLVQSGAEVKKPGESLKISCKGSGYTFTENIIHWVRQMPGKGLEWIGWFHP | 376 |
| FAP1- | GSGSIKYNEKFKDQVTISADKSISTAYLQWSSLKASDTAMYFCARHGGTGRGA | |
| G4Fd- | MDYWGQGTLVTVSSASTKGPSVFPLAPCSRSTSESTAALGCLVKDYFPEPVTV | |
| Fc(G1_AAA_C217S)_delK- | SWNSGALTSGVHTFPAVLQSSGLYSLSSVVTVPSSSLGTKTYTCNVDHKPSNT | |
| GGSGGSGG | KVDKRVESKY | |
| SGGS- | EPKSSDKTHTCPPCPAPEAAGGPSVFLFPPKPKDTLMISRTPEVTCVVVDVSH | |
| L_T3A- | EDPEVKFNWYVDGVEVHNAKTKPREEQYNSTYRVVSVLTVLHQDWLNGKEYKC | |
| GGSGGGPL | KVSNKALAAPIEKTISKAKGQPREPQVYTLPPSRDELTKNQVSLTCLVKGFYP | |
| G | SDIAVEWESNGQPENNYKTTPPVLDSDGSFFLYSKLTVDKSRWQQGNVFSCSV | |
| | MHEALHNHYTQKSLSLSPGGGSGGSGGSGGSAPASSSTKKTQLQLEHLLLDLQ | |
| | MILNGINNYKNPKLTRMLTFKFYMPKKATELKHLQCLEEELKPLEEALNLAPS | |
| | KNFHLRPRDLISNINVIVLELKGSETTFMCEYADETATIVEFLNRWITFSQST | |
| | ISTLTGGSGGGPLG | |
| Chain 5: | LAGGGAELCDDDPPEIPHATFKAMAYKEGTMLNCECKRGFRRIKSGSLYMLCT | 377 |
| LAGGGA-R | GNSSHSSWDNQCQCTSSATRNTTKQVTPQPEEQKERKTTEMQSPMQPVDQASL | |
| | PGHCREPPPWENEATERIYHFVVGQMVYYQCVQGYRALHRGPAESVCKMTHGK | |
| | TRWTQPQLICTGE | |

P14501953 Activatable Proprotein

| | | |
|---|---|---|
| Chains 1 | DIVMTQTPLSLSVTPGQPASISCRASKSVSTSAYSYMHWYLQKPGQSPQLLIY | 378 |
| and 2: | LASNLESGVPDRFSGSGSGTDFTLKISRVEAEDVGVYYCQHSRELPYTFGQGT | |
| FAP-L1- | KLEIKRTVAAPSVFIFPPSDEQLKSGTASVVCLLNNFYPREAKVQWKVDNALQ | |
| huIgkLC | SGNSQESVTEQDSKDSTYSLSSTLTLSKADYEKHKVYACEVTHQGLSSPVTKS | |
| | FNRGEC | |
| Chains 3 | EVQLVQSGAEVKKPGESLKISCKGSGYTFTENIIHWVRQMPGKGLEWIGWFHP | 379 |
| and 4: | GSGSIKYNEKFKDQVTISADKSISTAYLQWSSLKASDTAMYFCARHGGTGRGA | |
| FAP1- | MDYWGQGTLVTVSSASTKGPSVFPLAPCSRSTSESTAALGCLVKDYFPEPVTV | |
| G4Fd- | SWNSGALTSGVHTFPAVLQSSGLYSLSSVVTVPSSSLGTKTYTCNVDHKPSNT | |
| Fc(G1_AAA_C217S)_delK- | KVDKRVESKYEPKSSDKTHTCPPCPAPEAAGGPSVFLFPPKPKDTLMISRTPE | |
| GGSGGSGG | VTCVVVDVSHEDPEVKFNWYVDGVEVHNAKTKPREEQYNSTYRVVSVLTVLHQ | |
| SGGS- | DWLNGKEYKCKVSNKALAAPIEKTISKAKGQPREPQVYTLPPSRDELTKNQVS | |
| L_T3A- | LTCLVKGFYPSDIAVEWESNGQPENNYKTTPPVLDSDGSFFLYSKLTVDKSRW | |
| GGSGGSGR | QQGNVFSCSVMHEALHNHYTQKSLSLSPGGGSGGSGGSGGSAPASSSTKKTQL | |
| SDNHGGA- | QLEHLLLDLQMILNGINNYKNPKLTRMLTFKFYMPKKATELKHLQCLEEELKP | |
| R 12/15 | LEEALNLAPSKNFHLRPRDLISNINVIVLELKGSETTFMCEYADETATIVEFL | |
| | NRWITFSQSTISTLTGGSGGSGRSDNHGGAELCDDDPPEIPHATFKAMAYKEG | |
| | TMLNCECKRGFRRIKSGSLYMLCTGNSSHSSWDNQCQCTSSATRNTTKQVTPQ | |
| | PEEQKERKTTEMQSPMQPVDQASLPGHCREPPPWENEATERIYHFVVGQMVYY | |
| | QCVQGYRALHRGPAESVCKMTHGKTRWTQPQLICTGE | |

P14501953 Cleaved proteins (Complete uPA/Matriptase cleavage)

| | | |
|---|---|---|
| Chains 1 | DIVMTQTPLSLSVTPGQPASISCRASKSVSTSAYSYMHWYLQKPGQSPQLLIY | 380 |
| and 2: | LASNLESGVPDRFSGSGSGTDFTLKISRVEAEDVGVYYCQHSRELPYTFGQGT | |
| FAP-L1- | KLEIKRTVAAPSVFIFPPSDEQLKSGTASVVCLLNNFYPREAKVQWKVDNALQ | |
| huIgkLC | SGNSQESVTEQDSKDSTYSLSSTLTLSKADYEKHKVYACEVTHQGLSSPVTKS | |
| | FNRGEC | |
| Chains 3 | EVQLVQSGAEVKKPGESLKISCKGSGYTFTENIIHWVRQMPGKGLEWIGWFHP | 381 |
| and 4: | GSGSIKYNEKFKDQVTISADKSISTAYLQWSSLKASDTAMYFCARHGGTGRGA | |
| FAP1- | MDYWGQGTLVTVSSASTKGPSVFPLAPCSRSTSESTAALGCLVKDYFPEPVTV | |
| G4Fd- | SWNSGALTSGVHTFPAVLQSSGLYSLSSVVTVPSSSLGTKTYTCNVDHKPSNT | |
| Fc(G1_AAA_C217S)_delK- | KVDKRVESKY | |
| GGSGGSGG | EPKSSDKTHTCPPCPAPEAAGGPSVFLFPPKPKDTLMISRTPEVTCVVVDVSH | |
| SGGS- | EDPEVKFNWYVDGVEVHNAKTKPREEQYNSTYRVVSVLTVLHQDWLNGKEYKC | |
| L_T3A- | KVSNKALAAPIEKTISKAKGQPREPQVYTLPPSRDELTKNQVSLTCLVKGFYP | |
| GGSGGSGR | SDIAVEWESNGQPENNYKTTPPVLDSDGSFFLYSKLTVDKSRWQQGNVFSCSV | |
| | MHEALHNHYTQKSLSLSPGGGSGGSGGSGGSAPASSSTKKTQLQLEHLLLDLQ | |
| | MILNGINNYKNPKLTRMLTFKFYMPKKATELKHLQCLEEELKPLEEALNLAPS | |
| | KNFHLRPRDLISNINVIVLELKGSETTFMCEYADETATIVEFLNRWITFSQST | |
| | ISTLTGGSGGSGR | |
| Chains 5 | SDNHGGAELCDDDPPEIPHATFKAMAYKEGTMLNCECKRGFRRIKSGSLYMLC | 382 |
| and 6: | TGNSSHSSWDNQCQCTSSATRNTTKQVTPQPEEQKERKTTEMQSPMQPVDQAS | |
| SDNHGGA- | LPGHCREPPPWENEATERIYHFVVGQMVYYQCVQGYRALHRGPAESVCKMTHG | |
| R | KTRWTQPQLICTGE | |

P14501953 Cleaved proteins (Partial uPA/Matriptase cleavage)

| | | |
|---|---|---|
| Chains 1 | DIVMTQTPLSLSVTPGQPASISCRASKSVSTSAYSYMHWYLQKPGQSPQLLIY | 383 |
| and 2: | LASNLESGVPDRFSGSGSGTDFTLKISRVEAEDVGVYYCQHSRELPYTFGQGT | |
| FAP-L1- | KLEIKRTVAAPSVFIFPPSDEQLKSGTASVVCLLNNFYPREAKVQWKVDNALQ | |
| huIgkLC | SGNSQESVTEQDSKDSTYSLSSTLTLSKADYEKHKVYACEVTHQGLSSPVTKS | |
| | FNRGEC | |
| Chain 3: | EVQLVQSGAEVKKPGESLKISCKGSGYTFTENIIHWVRQMPGKGLEWIGWFHP | 384 |
| FAP1- | GSGSIKYNEKFKDQVTISADKSISTAYLQWSSLKASDTAMYFCARHGGTGRGA | |
| G4Fd- | MDYWGQGTLVTVSSASTKGPSVFPLAPCSRSTSESTAALGCLVKDYFPEPVTV | |
| Fc(G1_AA | SWNSGALTSGVHTFPAVLQSSGLYSLSSVVTVPSSSLGTKTYTCNVDHKPSNT | |
| A_C217S) | KVDKRVESKYEPKSSDKTHTCPPCPAPEAAGGPSVFLFPPKPKDTLMISRTPE | |
| del K- | VTCVVVDVSHEDPEVKFNWYVDGVEVHNAKTKPREEQYNSTYRVVSVLTVLHQ | |
| GGSGGSGG | DWLNGKEYKCKVSNKALAAPIEKTISKAKGQPREPQVYTLPPSRDELTKNQVS | |
| SGGS- | LTCLVKGFYPSDIAVEWESNGQPENNYKTTPPVLDSDGSFFLYSKLTVDKSRW | |
| L_T3A- | QQGNVFSCSVMHEALHNHYTQKSLSLSPGGGSGGSGGSGGSAPASSSTKKTQL | |
| GGSGGSGR | QLEHLLLDLQMILNGINNYKNPKLTRMLTFKFYMPKKATELKHLQCLEEELKP | |
| SDNHGGA- | LEEALNLAPSKNFHLRPRDLISNINVIVLELKGSETTFMCEYADETATIVEFL | |
| R | NRWITFSQSTISTLTGGSGGSGRSDNHGGAELCDDDPPEIPHATFKAMAYKEG | |
| | TMLNCECKRGFRRIKSGSLYMLCTGNSSHSSWDNQCQCTSSATRNTTKQVTPQ | |
| | PEEQKERKTTEMQSPMQPVDQASLPGHCREPPPWENEATERIYHFVVGQMVYY | |
| | QCVQGYRALHRGPAESVCKMTHGKTRWTQPQLICTGE | |
| Chain 4: | EVQLVQSGAEVKKPGESLKISCKGSGYTFTENIIHWVRQMPGKGLEWIGWFHP | 385 |
| FAP1- | GSGSIKYNEKFKDQVTISADKSISTAYLQWSSLKASDTAMYFCARHGGTGRGA | |
| G4Fd- | MDYWGQGTLVTVSSASTKGPSVFPLAPCSRSTSESTAALGCLVKDYFPEPVTV | |
| Fc(G1_AAA_C217S)_delK- | SWNSGALTSGVHTFPAVLQSSGLYSLSSVVTVPSSSLGTKTYTCNVDHKPSNT | |
| GGSGGSGG | KVDKRVESKY | |
| SGGS- | EPKSSDKTHTCPPCPAPEAAGGPSVFLFPPKPKDTLMISRTPEVTCVVVDVSH | |
| L_T3A- | EDPEVKFNWYVDGVEVHNAKTKPREEQYNSTYRVVSVLTVLHQDWLNGKEYKC | |
| GGSGGSGR | KVSNKALAAPIEKTISKAKGQPREPQVYTLPPSRDELTKNQVSLTCLVKGFYP | |
| | SDIAVEWESNGQPENNYKTTPPVLDSDGSFFLYSKLTVDKSRWQQGNVFSCSV | |
| | MHEALHNHYTQKSLSLSPGGGSGGSGGSGGSAPASSSTKKTQLQLEHLLLDLQ | |
| | MILNGINNYKNPKLTRMLTFKFYMPKKATELKHLQCLEEELKPLEEALNLAPS | |
| | KNFHLRPRDLISNINVIVLELKGSETTFMCEYADETATIVEFLNRWITFSQST | |
| | ISTLTGGSGGSGR | |
| Chain 5: | SDNHGGAELCDDDPPEIPHATFKAMAYKEGTMLNCECKRGFRRIKSGSLYMLC | 386 |
| SDNHGGA- | TGNSSHSSWDNQCQCTSSATRNTTKQVTPQPEEQKERKTTEMQSPMQPVDQAS | |
| R | LPGHCREPPPWENEATERIYHFVVGQMVYYQCVQGYRALHRGPAESVCKMTHG | |
| | KTRWTQPQLICTGE | |

P14501953 Cleaved proteins (Complete Legumain cleavage)

| | | |
|---|---|---|
| Chains 1 | DIVMTQTPLSLSVTPGQPASISCRASKSVSTSAYSYMHWYLQKPGQSPQLLIY | 387 |
| and 2: | LASNLESGVPDRFSGSGSGTDFTLKISRVEAEDVGVYYCQHSRELPYTFGQGT | |
| FAP-L1- | KLEIKRTVAAPSVFIFPPSDEQLKSGTASVVCLLNNFYPREAKVQWKVDNALQ | |
| huIgkLC | SGNSQESVTEQDSKDSTYSLSSTLTLSKADYEKHKVYACEVTHQGLSSPVTKS | |
| | FNRGEC | |
| Chains 3 | EVQLVQSGAEVKKPGESLKISCKGSGYTFTENIIHWVRQMPGKGLEWIGWFHP | 388 |
| and 4: | GSGSIKYNEKFKDQVTISADKSISTAYLQWSSLKASDTAMYFCARHGGTGRGA | |
| FAP1- | MDYWGQGTLVTVSSASTKGPSVFPLAPCSRSTSESTAALGCLVKDYFPEPVTV | |
| G4Fd- | SWNSGALTSGVHTFPAVLQSSGLYSLSSVVTVPSSSLGTKTYTCNVDHKPSNT | |
| Fc(G1_AAA_C217S)_delK- | KVDKRVESKY | |
| GGSGGSGG | EPKSSDKTHTCPPCPAPEAAGGPSVFLFPPKPKDTLMISRTPEVTCVVVDVSH | |
| SGGS- | EDPEVKFNWYVDGVEVHNAKTKPREEQYNSTYRVVSVLTVLHQDWLNGKEYKC | |
| L_T3A- | KVSNKALAAPIEKTISKAKGQPREPQVYTLPPSRDELTKNQVSLTCLVKGFYP | |
| GGSGGSGR | SDIAVEWESNGQPENNYKTTPPVLDSDGSFFLYSKLTVDKSRWQQGNVFSCSV | |
| SDN | MHEALHNHYTQKSLSLSPGGGSGGSGGSGGSAPASSSTKKTQLQLEHLLLDLQ | |
| | MILNGINNYKNPKLTRMLTFKFYMPKKATELKHLQCLEEELKPLEEALNLAPS | |
| | KNFHLRPRDLISNINVIVLELKGSETTFMCEYADETATIVEFLNRWITFSQST | |
| | ISTLTGGSGGSGRSDN | |
| Chains 5 | HGGAELCDDDPPEIPHATFKAMAYKEGTMLNCECKRGFRRIKSGSLYMLCTGN | 389 |
| and 6: | SSHSSWDNQCQCTSSATRNTTKQVTPQPEEQKERKTTEMQSPMQPVDQASLPG | |
| HGGA-R | HCREPPPWENEATERIYHFVVGQMVYYQCVQGYRALHRGPAESVCKMTHGKTR | |
| | WTQPQLICTGE | |

P14501953 Cleaved proteins (Partial Legumain cleavage)

| | | |
|---|---|---|
| Chains 1 | DIVMTQTPLSLSVTPGQPASISCRASKSVSTSAYSYMHWYLQKPGQSPQLLIY | 390 |
| and 2: | LASNLESGVPDRFSGSGSGTDFTLKISRVEAEDVGVYYCQHSRELPYTFGQGT | |
| FAP-L1- | KLEIKRTVAAPSVFIFPPSDEQLKSGTASVVCLLNNFYPREAKVQWKVDNALQ | |
| huIgkLC | SGNSQESVTEQDSKDSTYSLSSTLTLSKADYEKHKVYACEVTHQGLSSPVTKS | |
| | FNRGEC | |
| Chain 3: | EVQLVQSGAEVKKPGESLKISCKGSGYTFTENIIHWVRQMPGKGLEWIGWFHP | 391 |
| FAP1- | GSGSIKYNEKFKDQVTISADKSISTAYLQWSSLKASDTAMYFCARHGGTGRGA | |
| G4Fd- | MDYWGQGTLVTVSSASTKGPSVFPLAPCSRSTSESTAALGCLVKDYFPEPVTV | |
| Fc(G1_AAA_C217S)_delK- | SWNSGALTSGVHTFPAVLQSSGLYSLSSVVTVPSSSLGTKTYTCNVDHKPSNT | |
| GGSGGSGG | KVDKRVESKYEPKSSDKTHTCPPCPAPEAAGGPSVFLFPPKPKDTLMISRTPE | |
| SGGS- | VTCVVVDVSHEDPEVKFNWYVDGVEVHNAKTKPREEQYNSTYRVVSVLTVLHQ | |
| L_T3A- | DWLNGKEYKCKVSNKALAAPIEKTISKAKGQPREPQVYTLPPSRDELTKNQVS | |
| GGSGGSGR | LTCLVKGFYPSDIAVEWESNGQPENNYKTTPPVLDSDGSFFLYSKLTVDKSRW | |
| SDNHGGA- | QQGNVFSCSVMHEALHNHYTQKSLSLSPGGGSGGSGGSGGSAPASSSTKKTQL | |
| R | QLEHLLLDLQMILNGINNYKNPKLTRMLTFKFYMPKKATELKHLQCLEEELKP | |
| | LEEALNLAPSKNFHLRPRDLISNINVIVLELKGSETTFMCEYADETATIVEFL | |
| | NRWITFSQSTISTLTGGSGGSGRSDNHGGAELCDDDPPEIPHATFKAMAYKEG | |
| | TMLNCECKRGFRRIKSGSLYMLCTGNSSHSSWDNQCQCTSSATRNTTKQVTPQ | |
| | PEEQKERKTTEMQSPMQPVDQASLPGHCREPPPWENEATERIYHFVVGQMVYY | |
| | QCVQGYRALHRGPAESVCKMTHGKTRWTQPQLICTGE | |
| Chain 4: | EVQLVQSGAEVKKPGESLKISCKGSGYTFTENIIHWVRQMPGKGLEWIGWFHP | 392 |
| FAP1- | GSGSIKYNEKFKDQVTISADKSISTAYLQWSSLKASDTAMYFCARHGGTGRGA | |
| G4Fd- | MDYWGQGTLVTVSSASTKGPSVFPLAPCSRSTSESTAALGCLVKDYFPEPVTV | |
| Fc(G1_AAA_C217S)_delK- | SWNSGALTSGVHTFPAVLQSSGLYSLSSVVTVPSSSLGTKTYTCNVDHKPSNT | |
| GGSGGSGG | KVDKRVESKYEPKSSDKTHTCPPCPAPEAAGGPSVFLFPPKPKDTLMISRTPE | |
| SGGS- | VTCVVVDVSHEDPEVKFNWYVDGVEVHNAKTKPREEQYNSTYRVVSVLTVLHQ | |
| L_T3A- | DWLNGKEYKCKVSNKALAAPIEKTISKAKGQPREPQVYTLPPSRDELTKNQVS | |
| GGSGGSGR | LTCLVKGFYPSDIAVEWESNGQPENNYKTTPPVLDSDGSFFLYSKLTVDKSRW | |
| SDN | QQGNVFSCSVMHEALHNHYTQKSLSLSPGGGSGGSGGSGGSAPASSSTKKTQL | |
| | QLEHLLLDLQMILNGINNYKNPKLTRMLTFKFYMPKKATELKHLQCLEEELKP | |
| | LEEALNLAPSKNFHLRPRDLISNINVIVLELKGSETTFMCEYADETATIVEFL | |
| | NRWITFSQSTISTLTGGSGGSGRSDN | |
| Chain 5: | HGGAELCDDDPPEIPHATFKAMAYKEGTMLNCECKRGFRRIKSGSLYMLCTGN | 393 |
| HGGA-R | SSHSSWDNQCQCTSSATRNTTKQVTPQPEEQKERKTTEMQSPMQPVDQASLPG | |
| | HCREPPPWENEATERIYHFVVGQMVYYQCVQGYRALHRGPAESVCKMTHGKTR | |
| | WTQPQLICTGE | |

P1972 Activatable Proprotein

| | | |
|---|---|---|
| Chains 1 | EPKSSDKTHTCPPCPAPELLGGPSVFLFPPKPKDTLMISRTPEVTCVVVDVSH | 394 |
| and 2: | EDPEVKFNWYVDGVEVHNAKTKPREEQYNSTYRVVSVLTVLHQDWLNGKEYKC | |
| Fc- | KVSNKALPAPIEKTISKAKGQPREPQVYTLPPSREEMTKNQVSLTCLVKGFYP | |
| stableLinker- | SDIAVEWESNGQPENNYKTTPPVLDSDGSFFLYSKLTVDKSRWQQGNVFSCSV | |
| L_wt_E61S_T3A- | MHEALHNHYTQKSLSLSPGKGGGGSGGGGSAPASSSTKKTQLQLEHLLLDLQM | |
| GSGSENLY | ILNGINNYKNPKLTRMLTFKFYMPKKATELKHLQCLESELKPLEEVLNLAQSK | |
| FQGGSGS- | NFHLRPRDLISNINVIVLELKGSETTFMCEYADETATIVEFLNRWITFSQSII | |
| R_K38S | STLTGSGSENLYFQGGSGSELCDDDPPEIPHATFKAMAYKEGTMLNCECKRGF | |
| | RRISSGSLYMLCTGNSSHSSWDNQCQCTSSATRNTTKQVTPQPEEQKERKTTE | |
| | MQSPMQPVDQASLPGHCREPPPWENEATERIYHFVVGQMVYYQCVQGYRALHR | |
| | GPAESVCKMTHGKTRWTQPQLICTGE | |

P1972 Cleaved proteins (Complete TEV cleavage)

| | | |
|---|---|---|
| Chains 1 | EPKSSDKTHTCPPCPAPELLGGPSVFLFPPKPKDTLMISRTPEVTCVVVDVSH | 395 |
| and 2: | EDPEVKFNWYVDGVEVHNAKTKPREEQYNSTYRVVSVLTVLHQDWLNGKEYKC | |
| Fc- | KVSNKALPAPIEKTISKAKGQPREPQVYTLPPSREEMTKNQVSLTCLVKGFYP | |
| stableLinker- | SDIAVEWESNGQPENNYKTTPPVLDSDGSFFLYSKLTVDKSRWQQGNVFSCSV | |
| L_wt_E61S_T3A- | MHEALHNHYTQKSLSLSPGKGGGGSGGGGSAPASSSTKKTQLQLEHLLLDLQM | |
| GSGSENLY | ILNGINNYKNPKLTRMLTFKFYMPKKATELKHLQCLESELKPLEEVLNLAQSK | |
| F | NFHLRPRDLISNINVIVLELKGSETTFMCEYADETATIVEFLNRWITFSQSII | |
| | STLTGSGSENLYFQ | |
| Chains 3 | GGSGSELCDDDPPEIPHATFKAMAYKEGTMLNCECKRGFRRISSGSLYMLCTG | 396 |
| and 4: | NSSHSSWDNQCQCTSSATRNTTKQVTPQPEEQKERKTTEMQSPMQPVDQASLP | |
| QGGSGS- | GHCREPPPWENEATERIYHFVVGQMVYYQCVQGYRALHRGPAESVCKMTHGKT | |
| R_K38S | RWTQPQLICTGE | |

P1972 Cleaved proteins (Partial TEV cleavage)

| | | |
|---|---|---|
| Chain 1: | EPKSSDKTHTCPPCPAPELLGGPSVFLFPPKPKDTLMISRTPEVTCVVVDVSH | 397 |
| Fc- | EDPEVKFNWYVDGVEVHNAKTKPREEQYNSTYRVVSVLTVLHQDWLNGKEYKC | |
| stableLinker- | KVSNKALPAPIEKTISKAKGQPREPQVYTLPPSREEMTKNQVSLTCLVKGFYP | |
| L_wt_E61S_T3A- | SDIAVEWESNGQPENNYKTTPPVLDSDGSFFLYSKLTVDKSRWQQGNVFSCSV | |
| GSGSENLY | MHEALHNHYTQKSLSLSPGKGGGGSGGGGSAPASSSTKKTQLQLEHLLLDLQM | |
| FQGGSGS- | ILNGINNYKNPKLTRMLTFKFYMPKKATELKHLQCLESELKPLEEVLNLAQSK | |
| R_K38S | NFHLRPRDLISNINVIVLELKGSETTFMCEYADETATIVEFLNRWITFSQSII | |
| | STLTGSGSENLYFQGGSGSELCDDDPPEIPHATFKAMAYKEGTMLNCECKRGF | |
| | RRISSGSLYMLCTGNSSHSSWDNQCQCTSSATRNTTKQVTPQPEEQKERKTTE | |
| | MQSPMQPVDQASLPGHCREPPPWENEATERIYHFVVGQMVYYQCVQGYRALHR | |
| | GPAESVCKMTHGKTRWTQPQLICTGE | |
| Chain 2: | EPKSSDKTHTCPPCPAPELLGGPSVFLFPPKPKDTLMISRTPEVTCVVVDVSH | 398 |
| Fc- | EDPEVKFNWYVDGVEVHNAKTKPREEQYNSTYRVVSVLTVLHQDWLNGKEYKC | |
| stableLinker- | KVSNKALPAPIEKTISKAKGQPREPQVYTLPPSREEMTKNQVSLTCLVKGFYP | |
| L_wt_E61S_T3A- | SDIAVEWESNGQPENNYKTTPPVLDSDGSFFLYSKLTVDKSRWQQGNVFSCSV | |
| GSGSENLY | MHEALHNHYTQKSLSLSPGKGGGGSGGGGSAPASSSTKKTQLQLEHLLLDLQM | |
| F | ILNGINNYKNPKLTRMLTFKFYMPKKATELKHLQCLESELKPLEEVLNLAQSK | |
| | NFHLRPRDLISNINVIVLELKGSETTFMCEYADETATIVEFLNRWITFSQSII | |
| | STLTGSGSENLYFQ | |
| Chain 3: | GGSGSELCDDDPPEIPHATFKAMAYKEGTMLNCECKRGFRRISSGSLYMLCTG | 399 |
| QGGSGS- | NSSHSSWDNQCQCTSSATRNTTKQVTPQPEEQKERKTTEMQSPMQPVDQASLP | |
| R_K38S | GHCREPPPWENEATERIYHFVVGQMVYYQCVQGYRALHRGPAESVCKMTHGKT | |
| | RWTQPQLICTGE | |

P2008 Activatable Proprotein

| | | |
|---|---|---|
| Chains 1 | EPKSSDKTHTCPPCPAPEAAGGPSVFLFPPKPKDTLMISRTPEVTCVVVDVSH | 400 |
| and 2: | EDPEVKFNWYVDGVEVHNAKTKPREEQYNSTYRVVSVLTVLHQDWLNGKEYKC | |
| 90_Fc(G1_AAA_C217S)_delK- | KVSNKALAAPIEKTISKAKGQPREPQVYTLPPSRDELTKNQVSLTCLVKGFYP | |
| GGSPLGLA | SDIAVEWESNGQPENNYKTTPPVLDSDGSFFLYSKLTVDKSRWQQGNVFSCSV | |
| GGGS- | MHEALHNHYTQKSLSLSPGGGSPLGLAGGGSAAASSSTKKTQLQLEHLLLDLQ | |
| L_F42A_P2A_T3A- | MILNGINNYKNPKLTRMLTAKFYMPKKATELKHLQCLEEELKPLEEVLNLAQS | |
| GGSGGSGG | KNFHLRPRDLISNINVIVLELKGSETTFMCEYADETATIVEFLNRWITFSQSI | |
| SGGSGGA- | ISTLTGGSGGSGGSGGSGGAELCDDDPPEIPHATFKAMAYKEGTMLNCECKRG | |
| R | FRRIKSGSLYMLCTGNSSHSSWDNQCQCTSSATRNTTKQVTPQPEEQKERKTT | |
| | EMQSPMQPVDQASLPGHCREPPPWENEATERIYHFVVGQMVYYQCVQGYRALH | |
| | RGPAESVCKMTHGKTRWTQPQLICTGE | |

P2009 Activatable Proprotein

| | | |
|---|---|---|
| Chains 1 | EPKSSDKTHTCPPCPAPEAAGGPSVFLFPPKPKDTLMISRTPEVTCVVVDVSH | 401 |
| and 2: | EDPEVKFNWYVDGVEVHNAKTKPREEQYNSTYRVVSVLTVLHQDWLNGKEYKC | |
| 91_Fc(G1_AAA_C217S)_delK- | KVSNKALAAPIEKTISKAKGQPREPQVYTLPPSRDELTKNQVSLTCLVKGFYP | |
| GGSPLGLA | SDIAVEWESNGQPENNYKTTPPVLDSDGSFFLYSKLTVDKSRWQQGNVFSCSV | |
| GGGS- | MHEALHNHYTQKSLSLSPGGGSPLGLAGGGSAAASSSTKKTQLQLEHLLLDLQ | |
| L_wt_P2A_T3A- | MILNGINNYKNPKLTRMLTFKFYMPKKATELKHLQCLEEELKPLEEVLNLAQS | |
| GGSGGSGG | KNFHLRPRDLISNINVIVLELKGSETTFMCEYADETATIVEFLNRWITFSQSI | |
| SGGSGGA- | ISTLTGGSGGSGGSGGSGGAELCDDDPPEIPHATFKAMAYKEGTMLNCECKRG | |
| R | FRRIKSGSLYMLCTGNSSHSSWDNQCQCTSSATRNTTKQVTPQPEEQKERKTT | |
| | EMQSPMQPVDQASLPGHCREPPPWENEATERIYHFVVGQMVYYQCVQGYRALH | |
| | RGPAESVCKMTHGKTRWTQPQLICTGE | |

P2010 Activatable Proprotein

| | | |
|---|---|---|
| Chains 1 | EPKSSDKTHTCPPCPAPEAAGGPSVFLFPPKPKDTLMISRTPEVTCVVVDVSH | 402 |
| and 2: | EDPEVKFNWYVDGVEVHNAKTKPREEQYNSTYRVVSVLTVLHQDWLNGKEYKC | |
| 92_Fc(G1_AAA_C217S)_delK- | KVSNKALAAPIEKTISKAKGQPREPQVYTLPPSRDELTKNQVSLTCLVKGFYP | |
| GGSPLGLA | SDIAVEWESNGQPENNYKTTPPVLDSDGSFFLYSKLTVDKSRWQQGNVFSCSV | |
| GGGS- | MHEALHNHYTQKSLSLSPGGGSPLGLAGGGSAAASSSTKKTQLQLEHLLLDLQ | |
| L_tm_P2A_T3A- | MILNGINNYKNPKLTRMLTFKFYMPKKATELKHLQCLEEELKPLEEALNLAPS | |
| GGSGGSGG | KNFHLRPRDLISNINVIVLELKGSETTFMCEYADETATIVEFLNRWITFSQST | |
| SGGSGGA- | ISTLTGGSGGSGGSGGSGGAELCDDDPPEIPHATFKAMAYKEGTMLNCECKRG | |
| R | FRRIKSGSLYMLCTGNSSHSSWDNQCQCTSSATRNTTKQVTPQPEEQKERKTT | |
| | EMQSPMQPVDQASLPGHCREPPPWENEATERIYHFVVGQMVYYQCVQGYRALH | |
| | RGPAESVCKMTHGKTRWTQPQLICTGE | |

P2011 Activatable Proprotein

| | | |
|---|---|---|
| Chains 1 | EPKSSDKTHTCPPCPAPEAAGGPSVFLFPPKPKDTLMISRTPEVTCVVVDVSH | 403 |
| and 2: | EDPEVKFNWYVDGVEVHNAKTKPREEQYNSTYRVVSVLTVLHQDWLNGKEYKC | |
| 93_Fc(G1_AAA_C217S)_delK- | KVSNKALAAPIEKTISKAKGQPREPQVYTLPPSRDELTKNQVSLTCLVKGFYP | |
| GGSGGSGG | SDIAVEWESNGQPENNYKTTPPVLDSDGSFFLYSKLTVDKSRWQQGNVFSCSV | |
| SGGS- | MHEALHNHYTQKSLSLSPGGGSGGSGGSGGSAAASSSTKKTQLQLEHLLLDLQ | |
| L_tm_P2A_T3A- | MILNGINNYKNPKLTRMLTFKFYMPKKATELKHLQCLEEELKPLEEALNLAPS | |
| GGSGGSPL | KNFHLRPRDLISNINVIVLELKGSETTFMCEYADETATIVEFLNRWITFSQST | |
| GLAGGGA- | ISTLTGGSGGSPLGLAGGGAELCDDDPPEIPHATFKAMAYKEGTMLNCECKRG | |
| R | FRRIKSGSLYMLCTGNSSHSSWDNQCQCTSSATRNTTKQVTPQPEEQKERKTT | |
| | EMQSPMQPVDQASLPGHCREPPPWENEATERIYHFVVGQMVYYQCVQGYRALH | |
| | RGPAESVCKMTHGKTRWTQPQLICTGE | |

P2012 Activatable Proprotein

| | | |
|---|---|---|
| Chains 1 | EPKSSDKTHTCPPCPAPEAAGGPSVFLFPPKPKDTLMISRTPEVTCVVVDVSH | 404 |
| and 2: | EDPEVKFNWYVDGVEVHNAKTKPREEQYNSTYRVVSVLTVLHQDWLNGKEYKC | |
| 94_Fc(G1_AAA_C217S)_delK | KVSNKALAAPIEKTISKAKGQPREPQVYTLPPSRDELTKNQVSLTCLVKGFYP | |
| GGSPLGLA | SDIAVEWESNGQPENNYKTTPPVLDSDGSFFLYSKLTVDKSRWQQGNVFSCSV | |
| GGGS- | MHEALHNHYTQKSLSLSPGGGSPLGLAGGGSAAASSSTKKTQLQLEHLLLDLQ | |
| L_tm_P2A_T3A- | MILNGINNYKNPKLTRMLTFKFYMPKKATELKHLQCLEEELKPLEEALNLAPS | |
| GGSGGSPL | KNFHLRPRDLISNINVIVLELKGSETTFMCEYADETATIVEFLNRWITFSQST | |
| GLAGGGA- | ISTLTGGSGGSPLGLAGGGAELCDDDPPEIPHATFKAMAYKEGTMLNCECKRG | |
| R | FRRIKSGSLYMLCTGNSSHSSWDNQCQCTSSATRNTTKQVTPQPEEQKERKTT | |
| | EMQSPMQPVDQASLPGHCREPPPWENEATERIYHFVVGQMVYYQCVQGYRALH | |
| | RGPAESVCKMTHGKTRWTQPQLICTGE | |

P2013 Activatable Proprotein

| | | |
|---|---|---|
| Chains 1 | EPKSSDKTHTCPPCPAPEAAGGPSVFLFPPKPKDTLYITREPEVTCVVVDVSH | 405 |
| and 2: | EDPEVKFNWYVDGVEVHNAKTKPREEQYNSTYRVVSVLTVLHQDWLNGKEYKC | |
| 95_Fc(G1 | KVSNKALAAPIEKTISKAKGQPREPQVYTLPPSRDELTKNQVSLTCLVKGFYP | |
| _AAA_C21 | SDIAVEWESNGQPENNYKTTPPVLDSDGSFFLYSKLTVDKSRWQQGNVFSCSV | |
| 7S)_delK | MHEALHNHYTQKSLSLSPGGGSPLGLAGGGSAAASSSTKKTQLQLEHLLLDLQ | |
| _YTE- | MILNGINNYKNPKLTRMLTFKFYMPKKATELKHLQCLEEELKPLEEALNLAPS | |
| GGSPLGLA | KNFHLRPRDLISNINVIVLELKGSETTFMCEYADETATIVEFLNRWITFSQST | |
| GGGS- | ISTLTGGSGGSGGSGGSGGAELCDDDPPEIPHATFKAMAYKEGTMLNCECKRG | |
| L_tm_P2A | FRRIKSGSLYMLCTGNSSHSSWDNQCQCTSSATRNTTKQVTPQPEEQKERKTT | |
| _T3A- | EMQSPMQPVDQASLPGHCREPPPWENEATERIYHFVVGQMVYYQCVQGYRALH | |
| GGSGGSGG | RGPAESVCKMTHGKTRWTQPQLICTGE | |
| SGGSGGA- | | |
| R | | |

P2236 Activatable Proprotein

| | | |
|---|---|---|
| Chains 1 | EPKSSDKTHTCPPCPAPEAAGGPSVFLFPPKPKDTLYITREPEVTCVVVDVSH | 406 |
| and 2: | EDPEVKFNWYVDGVEVHNAKTKPREEQYNSTYRVVSVLTVLHQDWLNGKEYKC | |
| 248_Fc(G1_AAA_C217S)_YTE- | KVSNKALAAPIEKTISKAKGQPREPQVYTLPPSRDELTKNQVSLTCLVKGFYP | |
| GGSPLGLA | SDIAVEWESNGQPENNYKTTPPVLDSDGSFFLYSKLTVDKSRWQQGNVFSCSV | |
| GGGSGGS- | MHEALHNHYTQKSLSLSPGKGGSPLGLAGGGSGGSTKKTQLQLEHLLLDLQMI | |
| L_wt_del_APASSS_N88R- | LNGINNYKNPKLTRMLTFKFYMPKKATELKHLQCLEEELKPLEEVLNLAQSKN | |
| GGSGGSGG | FHLRPRDLISRINVIVLELKGSETTFMCEYADETATIVEFLNRWITFSQSIIS | |
| SGGSGGA- | TLTGGSGGSGGSGGSGGAELCDDAPPEIPHATFKAMAYKEGTMLNCECKRGFR | |
| R_D6A | RIKSGSLYMLCTGNSSHSSWDNQCQCTSSATRNTTKQVTPQPEEQKERKTTEM | |
| | QSPMQPVDQASLPGHCREPPPWENEATERIYHFVVGQMVYYQCVQGYRALHRG | |
| | PAESVCKMTHGKTRWTQPQLICTGE | |

P2237 Activatable Proprotein

| | | |
|---|---|---|
| Chains 1 | EPKSSDKTHTCPPCPAPEAAGGPSVFLFPPKPKDTLYITREPEVTCVVVDVSH | 407 |
| and 2: | EDPEVKFNWYVDGVEVHNAKTKPREEQYNSTYRVVSVLTVLHQDWLNGKEYKC | |
| 249_Fc(G1_AAA_C217S)_YTE- | KVSNKALAAPIEKTISKAKGQPREPQVYTLPPSRDELTKNQVSLTCLVKGFYP | |
| GGSPLGLA | SDIAVEWESNGQPENNYKTTPPVLDSDGSFFLYSKLTVDKSRWQQGNVFSCSV | |
| GGGSGGS- | MHEALHNHYTQKSLSLSPGKGGSPLGLAGGGSGGSTKKTQLQLEHLLLDLQMI | |
| L_tm_del_APASSS_N88R- | LNGINNYKNPKLTRMLTFKFYMPKKATELKHLQCLEEELKPLEEALNLAPSKN | |
| GGSGGSGG | FHLRPRDLISRINVIVLELKGSETTFMCEYADETATIVEFLNRWITFSQSTIS | |
| SGGSGGA- | TLTGGSGGSGGSGGSGGAELCDDAPPEIPHATFKAMAYKEGTMLNCECKRGFR | |
| R_D6A | RIKSGSLYMLCTGNSSHSSWDNQCQCTSSATRNTTKQVTPQPEEQKERKTTEM | |
| | QSPMQPVDQASLPGHCREPPPWENEATERIYHFVVGQMVYYQCVQGYRALHRG | |
| | PAESVCKMTHGKTRWTQPQLICTGE | |

P2238 Activatable Proprotein

| | | |
|---|---|---|
| Chains 1 | EPKSSDKTHTCPPCPAPEAAGGPSVFLFPPKPKDTLYITREPEVTCVVVDVSH | 408 |
| and 2: | EDPEVKFNWYVDGVEVHNAKTKPREEQYNSTYRVVSVLTVLHQDWLNGKEYKC | |
| 250_Fc(G1_AAA_C217S)_YTE- | KVSNKALAAPIEKTISKAKGQPREPQVYTLPPSRDELTKNQVSLTCLVKGFYP | |
| GGSPLGLA | SDIAVEWESNGQPENNYKTTPPVLDSDGSFFLYSKLTVDKSRWQQGNVFSCSV | |
| GGGSGGS- | MHEALHNHYTQKSLSLSPGKGGSPLGLAGGGSGGSTKKTQLQLEHLLLDLQMI | |
| L_tm_del_APASSS_N88R- | LNGINNYKNPKLTRMLTFKFYMPKKATELKHLQCLEEELKPLEEALNLAPSKN | |
| GGSGGSGG | FHLRPRDLISRINVIVLELKGSETTFMCEYADETATIVEFLNRWITFSQSTIS | |
| SGGSGGA- | TLTGGSGGSGGSGGSGGAELCDDKPPEIPHATFKAMAYKEGTMLNCECKRGFR | |
| R_D6K | RIKSGSLYMLCTGNSSHSSWDNQCQCTSSATRNTTKQVTPQPEEQKERKTTEM | |
| | QSPMQPVDQASLPGHCREPPPWENEATERIYHFVVGQMVYYQCVQGYRALHRG | |
| | PAESVCKMTHGKTRWTQPQLICTGE | |

P2239 Activatable Proprotein

| | | |
|---|---|---|
| Chains 1 | EPKSSDKTHTCPPCPAPEAAGGPSVFLFPPKPKDTLYITREPEVTCVVVDVSH | 409 |
| and 2: | EDPEVKFNWYVDGVEVHNAKTKPREEQYNSTYRVVSVLTVLHQDWLNGKEYKC | |
| 251_Fc(G1_AAA_C217S)_YTE- | KVSNKALAAPIEKTISKAKGQPREPQVYTLPPSRDELTKNQVSLTCLVKGFYP | |
| GGSPLGLA | SDIAVEWESNGQPENNYKTTPPVLDSDGSFFLYSKLTVDKSRWQQGNVFSCSV | |
| GGGSGGS- | MHEALHNHYTQKSLSLSPGKGGSPLGLAGGGSGGSTKKTQLQLEHLLLDLQMI | |
| L_tm_del_APASSS_N88R_R38E- | LNGINNYKNPKLTEMLTFKFYMPKKATELKHLQCLEEELKPLEEALNLAPSKN | |
| GGSGGSGG | FHLRPRDLISRINVIVLELKGSETTFMCEYADETATIVEFLNRWITFSQSTIS | |
| SGGSGGA- | TLTGGSGGSGGSGGSGGAELCDDKPPEIPHATFKAMAYKEGTMLNCECKRGFR | |
| R_D6K | RIKSGSLYMLCTGNSSHSSWDNQCQCTSSATRNTTKQVTPQPEEQKERKTTEM | |
| | QSPMQPVDQASLPGHCREPPPWENEATERIYHFVVGQMVYYQCVQGYRALHRG | |
| | PAESVCKMTHGKTRWTQPQLICTGE | |

P2240 Activatable Proprotein

| | | |
|---|---|---|
| Chains 1 | EPKSSDKTHTCPPCPAPEAAGGPSVFLFPPKPKDTLYITREPEVTCVVVDVSH | 410 |
| and 2: | EDPEVKFNWYVDGVEVHNAKTKPREEQYNSTYRVVSVLTVLHQDWLNGKEYKC | |
| 252_Fc(G1_AAA_C217S)_YTE- | KVSNKALAAPIEKTISKAKGQPREPQVYTLPPSRDELTKNQVSLTCLVKGFYP | |
| GGSPLGLA | SDIAVEWESNGQPENNYKTTPPVLDSDGSFFLYSKLTVDKSRWQQGNVFSCSV | |
| GGGSGGS- | MHEALHNHYTQKSLSLSPGKGGSPLGLAGGGSGGSTKKTQLQLEHLLLDLQMI | |
| L_tm_del_APASSS_N88R_R38E- | LNGINNYKNPKLTEMLTFKFYMPKKATELKHLQCLEEELKPLEEALNLAPSKN | |
| GGSGGSGG | FHLRPRDLISRINVIVLELKGSETTFMCEYADETATIVEFLNRWITFSQSTIS | |
| SGGSGGA- | TLTGGSGGSGGSGGSGGAELCDDKPPEIPHATFKAMAYKEGTMLNCACKRGFR | |
| R_D6K_E29A | RIKSGSLYMLCTGNSSHSSWDNQCQCTSSATRNTTKQVTPQPEEQKERKTTEM | |
| | QSPMQPVDQASLPGHCREPPPWENEATERIYHFVVGQMVYYQCVQGYRALHRG | |
| | PAESVCKMTHGKTRWTQPQLICTGE | |

P2241 Activatable Proprotein

| | | |
|---|---|---|
| Chains 1 | EPKSSDKTHTCPPCPAPEAAGGPSVFLFPPKPKDTLYITREPEVTCVVVDVSH | 411 |
| and 2: | EDPEVKFNWYVDGVEVHNAKTKPREEQYNSTYRVVSVLTVLHQDWLNGKEYKC | |
| 253_Fc(G1_AAA_C217S)_YTE- | KVSNKALAAPIEKTISKAKGQPREPQVYTLPPSRDELTKNQVSLTCLVKGFYP | |
| GGSPLGLA | SDIAVEWESNGQPENNYKTTPPVLDSDGSFFLYSKLTVDKSRWQQGNVFSCSV | |
| GGGSGGS- | MHEALHNHYTQKSLSLSPGKGGSPLGLAGGGSGGSTKKTQLQLEHLLLDLQMI | |
| L_tm_del_APASSS_N88R_R38E- | LNGINNYKNPKLTEMLTFKFYMPKKATELKHLQCLEEELKPLEEALNLAPSKN | |
| GGSGGSGG | FHLRPRDLISRINVIVLELKGSETTFMCEYADETATIVEFLNRWITFSQSTIS | |
| SGGSGGA- | TLTGGSGGSGGSGGSGGAELCDDKPPEIPHATFKAMAYKEGTMLNCECKRGFR | |
| R_D6K_R3EA | AIKSGSLYMLCTGNSSHSSWDNQCQCTSSATRNTTKQVTPQPEEQKERKTTEM | |
| | QSPMQPVDQASLPGHCREPPPWENEATERIYHFVVGQMVYYQCVQGYRALHRG | |
| | PAESVCKMTHGKTRWTQPQLICTGE | |

P2242 Activatable Proprotein

| | | |
|---|---|---|
| Chains 1 | EPKSSDKTHTCPPCPAPEAAGGPSVFLFPPKPKDTLYITREPEVTCVVVDVSH | 412 |
| and 2: | EDPEVKFNWYVDGVEVHNAKTKPREEQYNSTYRVVSVLTVLHQDWLNGKEYKC | |
| 254_Fc(G1_AAA_C217S)_YTE- | KVSNKALAAPIEKTISKAKGQPREPQVYTLPPSRDELTKNQVSLTCLVKGFYP | |
| GGSPLGLA | SDIAVEWESNGQPENNYKTTPPVLDSDGSFFLYSKLTVDKSRWQQGNVFSCSV | |
| GGGSGGS- | MHEALHNHYTQKSLSLSPGKGGSPLGLAGGGSGGSTKKTQLQLEHLLLDLQMI | |
| L_tm_del_APASSS_N88R_R38E- | LNGINNYKNPKLTEMLTFKFYMPKKATELKHLQCLEEELKPLEEALNLAPSKN | |
| GGSGGSGG | FHLRPRDLISRINVIVLELKGSETTFMCEYADETATIVEFLNRWITFSQSTIS | |
| SGGSGGA- | TLTGGSGGSGGSGGSGGAELCDDKPPEIPHATFKAMAYKEGTMLNCECKRGFR | |
| R_D6K_K38A | RIASGSLYMLCTGNSSHSSWDNQCQCTSSATRNTTKQVTPQPEEQKERKTTEM | |
| | QSPMQPVDQASLPGHCREPPPWENEATERIYHFVVGQMVYYQCVQGYRALHRG | |
| | PAESVCKMTHGKTRWTQPQLICTGE | |

P2280 Activatable Proprotein

| | | |
|---|---|---|
| Chains 1 | EPKSSDKTHTCPPCPAPEAAGGPSVFLFPPKPKDTLMISRTPEVTCVVVDVSH | 413 |
| and 2: | EDPEVKFNWYVDGVEVHNAKTKPREEQYNSTYRVVSVLTVLHQDWLNGKEYKC | |
| 273_Fc(G1_AAA_C217S)_delK- | KVSNKALAAPIEKTISKAKGQPREPQVYTLPPSRDELTKNQVSLTCLVKGFYP | |
| GGSPLGLA | SDIAVEWESNGQPENNYKTTPPVLDSDGSFFLYSKLTVDKSRWQQGNVFSCSV | |
| GGGS-GG- | MHEALHNHYTQKSLSLSPGGGSPLGLAGGGSGGSTKKTQLQLEHLLLDLQMIL | |
| (STKK)- | NGINNYKNPKLTEMLTFKFYMPKKATELKHLQCLEEELKPLEEVLNLAQSKNF | |
| L_wt_del_APASS_N88R_R38E- | HLRPRDLISRINVIVLELKGSETTFMCEYADETATIVEFLNRWITFSQSIIST | |
| GGSGGSGG | LTGGSGGSGGSGGSGGAELCDDKPPEIPHATFKAMAYKEGTMLNCECKRGFRR | |
| SGGSGGA- | IKSGSLYMLCTGNSSHSSWDNQCQCTSSATRNTTKQVTPQPEEQKERKTTEMQ | |
| R_D6K | SPMQPVDQASLPGHCREPPPWENEATERIYHFVVGQMVYYQCVQGYRALHRGP | |
| | AESVCKMTHGKTRWTQPQLICTGE | |

P2281 Protein

| | | |
|---|---|---|
| Chains 1 | EPKSSDKTHTCPPCPAPEAAGGPSVFLFPPKPKDTLMISRTPEVTCVVVDVSH | 414 |
| and 2: | EDPEVKFNWYVDGVEVHNAKTKPREEQYNSTYRVVSVLTVLHQDWLNGKEYKC | |
| 274_Fc(G1_AAA_C217S)_delK- | KVSNKALAAPIEKTISKAKGQPREPQVYTLPPSRDELTKNQVSLTCLVKGFYP | |
| GGSGGSGG | SDIAVEWESNGQPENNYKTTPPVLDSDGSFFLYSKLTVDKSRWQQGNVFSCSV | |
| SGGS-GG- | MHEALHNHYTQKSLSLSPGGGSGGSGGSGGSGGSTKKTQLQLEHLLLDLQMIL | |
| (STKK)- | NGINNYKNPKLTEMLTFKFYMPKKATELKHLQCLEEELKPLEEVLNLAQSKNF | |
| L_wt_del_APASS_N88R_R38E- | HLRPRDLISRINVIVLELKGSETTFMCEYADETATIVEFLNRWITFSQSIIST | |
| GGSGGSGG | LTGGSGGSGGSGGSGGAELCDDKPPEIPHATFKAMAYKEGTMLNCECKRGFRR | |
| SGGSGGA- | IKSGSLYMLCTGNSSHSSWDNQCQCTSSATRNTTKQVTPQPEEQKERKTTEMQ | |
| R_D6K | SPMQPVDQASLPGHCREPPPWENEATERIYHFVVGQMVYYQCVQGYRALHRGP | |
| | AESVCKMTHGKTRWTQPQLICTGE | |

P2282 Activatable Proprotein

| | | |
|---|---|---|
| Chains 1 | EPKSSDKTHTCPPCPAPEAAGGPSVFLFPPKPKDTLMISRTPEVTCVVVDVSH | 415 |
| and 2: | EDPEVKFNWYVDGVEVHNAKTKPREEQYNSTYRVVSVLTVLHQDWLNGKEYKC | |
| 275_Fc(G1_AAA_C217S)_delK- | KVSNKALAAPIEKTISKAKGQPREPQVYTLPPSRDELTKNQVSLTCLVKGFYP | |
| GGSGGSGG | SDIAVEWESNGQPENNYKTTPPVLDSDGSFFLYSKLTVDKSRWQQGNVFSCSV | |
| SGGS-GG- | MHEALHNHYTQKSLSLSPGGGSGGSGGSGGSGGSTKKTQLQLEHLLLDLQMIL | |
| (STKK)- | NGINNYKNPKLTEMLTFKFYMPKKATELKHLQCLEEELKPLEEALNLAPSKNF | |
| L_tm_del_APASS_N88R_R38E- | HLRPRDLISRINVIVLELKGSETTFMCEYADETATIVEFLNRWITFSQSTIST | |
| GGSPLGLA | LTGGSPLGLAGGGSGGAELCDDKPPEIPHATFKAMAYKEGTMLNCECKRGFRR | |
| GGGSGGA- | IKSGSLYMLCTGNSSHSSWDNQCQCTSSATRNTTKQVTPQPEEQKERKTTEMQ | |
| R_D6K | SPMQPVDQASLPGHCREPPPWENEATERIYHFVVGQMVYYQCVQGYRALHRGP | |
| | AESVCKMTHGKTRWTQPQLICTGE | |

P2283 Protein

| | | |
|---|---|---|
| Chains 1 | EPKSSDKTHTCPPCPAPEAAGGPSVFLFPPKPKDTLMISRTPEVTCVVVDVSH | 416 |
| and 2: | EDPEVKFNWYVDGVEVHNAKTKPREEQYNSTYRVVSVLTVLHQDWLNGKEYKC | |
| 276_Fc(G1_AAA_C217S)_delK- | KVSNKALAAPIEKTISKAKGQPREPQVYTLPPSRDELTKNQVSLTCLVKGFYP | |
| GGSGGSGG | SDIAVEWESNGQPENNYKTTPPVLDSDGSFFLYSKLTVDKSRWQQGNVFSCSV | |
| SGGS-GG- | MHEALHNHYTQKSLSLSPGGGSGGSGGSGGSGGSTKKTQLQLEHLLLDLQMIL | |
| (STKK)- | NGINNYKNPKLTEMLTFKFYMPKKATELKHLQCLEEELKPLEEALNLAPSKNF | |
| L_tm_del_APASS_N88R_R38E- | HLRPRDLISRINVIVLELKGSETTFMCEYADETATIVEFLNRWITFSQSTIST | |
| GGSGGSGG | LTGGSGGSGGSGGSGGAELCDDKPPEIPHATFKAMAYKEGTMLNCECKRGFRR | |
| SGGSGGA- | IKSGSLYMLCTGNSSHSSWDNQCQCTSSATRNTTKQVTPQPEEQKERKTTEMQ | |
| R_D6K | SPMQPVDQASLPGHCREPPPWENEATERIYHFVVGQMVYYQCVQGYRALHRGP | |
| | AESVCKMTHGKTRWTQPQLICTGE | |

P2314 Activatable Proprotein

| | | |
|---|---|---|
| Chains 1 | EPKSSDKTHTCPPCPAPEAAGGPSVFLFPPKPKDTLYITREPEVTCVVVDVSH | 417 |
| and 2: | EDPEVKFNWYVDGVEVHNAKTKPREEQYNSTYRVVSVLTVLHQDWLNGKEYKC | |
| 301_Fc(G1_AAA_C217S)_YTE_delK- | KVSNKALAAPIEKTISKAKGQPREPQVYTLPPSRDELTKNQVSLTCLVKGFYP | |
| GGSGGSGG | SDIAVEWESNGQPENNYKTTPPVLDSDGSFFLYSKLTVDKSRWQQGNVFSCSV | |
| SGGS-GG- | MHEALHNHYTQKSLSLSPGGGSGGSGGSGGSGGSTKKTQLQLEHLLLDLQMIL | |
| L_tm_del_APASS_N88R_- | NGINNYKNPKLTRMLTFKFYMPKKATELKHLQCLEEELKPLEEALNLAPSKNF | |
| GGSPLGLA | HLRPRDLISRINVIVLELKGSETTFMCEYADETATIVEFLNRWITFSQSTIST | |
| GGGSGGA- | LTGGSPLGLAGGGSGGAELCDDDPPEIPHATFKAMAYKEGTMLNCECKRGFRR | |
| R | IKSGSLYMLCTGNSSHSSWDNQCQCTSSATRNTTKQVTPQPEEQKERKTTEMQ | |
| | SPMQPVDQASLPGHCREPPPWENEATERIYHFVVGQMVYYQCVQGYRALHRGP | |
| | AESVCKMTHGKTRWTQPQLICTGE | |

P2315 Activatable Proprotein

| | | |
|---|---|---|
| Chains 1 | EPKSSDKTHTCPPCPAPEAAGGPSVFLFPPKPKDTLYITREPEVTCVVVDVSH | 418 |
| and 2: | EDPEVKFNWYVDGVEVHNAKTKPREEQYNSTYRVVSVLTVLHQDWLNGKEYKC | |
| 302_Fc(G1_AAA_C217S)_YTE_delK- | KVSNKALAAPIEKTISKAKGQPREPQVYTLPPSRDELTKNQVSLTCLVKGFYP | |
| GGSGGSGG | SDIAVEWESNGQPENNYKTTPPVLDSDGSFFLYSKLTVDKSRWQQGNVFSCSV | |
| SGGS-GG- | MHEALHNHYTQKSLSLSPGGGSGGSGGSGGSGGSTKKTQLQLEHLLLDLQMIL | |
| L_tm_del_APASS_N88R_- | NGINNYKNPKLTRMLTFKFYMPKKATELKHLQCLEEELKPLEEALNLAPSKNF | |
| GGSPLGLA | HLRPRDLISRINVIVLELKGSETTFMCEYADETATIVEFLNRWITFSQSTIST | |
| GGGSGGA- | LTGGSPLGLAGGGSGGAELCDDDPPEIPHATFKAMAYKEGTMLNCECKRGFRR | |
| R K38A | IASGSLYMLCTGNSSHSSWDNQCQCTSSATRNTTKQVTPQPEEQKERKTTEMQ | |
| | SPMQPVDQASLPGHCREPPPWENEATERIYHFVVGQMVYYQCVQGYRALHRGP | |
| | AESVCKMTHGKTRWTQPQLICTGE | |

P2316 Protein

| | | |
|---|---|---|
| Chains 1 | EPKSSDKTHTCPPCPAPEAAGGPSVFLFPPKPKDTLYITREPEVTCVVVDVSH | 419 |
| and 2: | EDPEVKFNWYVDGVEVHNAKTKPREEQYNSTYRVVSVLTVLHQDWLNGKEYKC | |
| 303_Fc(G1_AAA_C217S)_YTE_delK- | KVSNKALAAPIEKTISKAKGQPREPQVYTLPPSRDELTKNQVSLTCLVKGFYP | |
| GGSGGSGG | SDIAVEWESNGQPENNYKTTPPVLDSDGSFFLYSKLTVDKSRWQQGNVFSCSV | |
| SGGS-GG- | MHEALHNHYTQKSLSLSPGGGSGGSGGSGGSGGSTKKTQLQLEHLLLDLQMIL | |
| L_tm_del_APASS_N88R_- | NGINNYKNPKLTRMLTFKFYMPKKATELKHLQCLEEELKPLEEALNLAPSKNF | |
| GGSGGSGG | HLRPRDLISRINVIVLELKGSETTFMCEYADETATIVEFLNRWITFSQSTIST | |
| SGGSGGA- | LTGGSGGSGGSGGSGGAELCDDDPPEIPHATFKAMAYKEGTMLNCECKRGFRR | |
| R | IKSGSLYMLCTGNSSHSSWDNQCQCTSSATRNTTKQVTPQPEEQKERKTTEMQ | |
| | SPMQPVDQASLPGHCREPPPWENEATERIYHFVVGQMVYYQCVQGYRALHRGP | |
| | AESVCKMTHGKTRWTQPQLICTGE | |

P2236 Cleaved proteins (Complete MMP-2 cleavage)

| | | |
|---|---|---|
| Chains 1 | EPKSSDKTHTCPPCPAPEAAGGPSVFLFPPKPKDTLYITREPEVTCVVVDVSH | 420 |
| and 2: | EDPEVKFNWYVDGVEVHNAKTKPREEQYNSTYRVVSVLTVLHQDWLNGKEYKC | |
| Fc(G1_AAA_C217S)_YTE- | KVSNKALAAPIEKTISKAKGQPREPQVYTLPPSRDELTKNQVSLTCLVKGFYP | |
| GGSPLG | SDIAVEWESNGQPENNYKTTPPVLDSDGSFFLYSKLTVDKSRWQQGNVFSCSV | |
| | MHEALHNHYTQKSLSLSPGKGGSPLG | |
| Chains 3 | LAGGGSGGSTKKTQLQLEHLLLDLQMILNGINNYKNPKLTRMLTFKFYMPKKA | 421 |
| and 4: | TELKHLQCLEEELKPLEEVLNLAQSKNFHLRPRDLISRINVIVLELKGSETTF | |
| LAGGGSGG | MCEYADETATIVEFLNRWITFSQSIISTLTGGSGGSGGSGGSGGAELCDDAPP | |
| S- | EIPHATFKAMAYKEGTMLNCECKRGFRRIKSGSLYMLCTGNSSHSSWDNQCQC | |
| L_wt_del_APASSS_N88R- | TSSATRNTTKQVTPQPEEQKERKTTEMQSPMQPVDQASLPGHCREPPPWENEA | |
| GGSGGSGG | TERIYHFVVGQMVYYQCVQGYRALHRGPAESVCKMTHGKTRWTQPQLICTGE | |
| SGGSGGA- | | |
| R_D6A | | |

P2236 Cleaved proteins (Partial MMP-2 cleavage)

| | | |
|---|---|---|
| Chain 1: | EPKSSDKTHTCPPCPAPEAAGGPSVFLFPPKPKDTLYITREPEVTCVVVDVSH | 422 |
| 248_Fc(G1_AAA_C217S)_YTE- | EDPEVKFNWYVDGVEVHNAKTKPREEQYNSTYRVVSVLTVLHQDWLNGKEYKC | |
| GGSPLGLA | KVSNKALAAPIEKTISKAKGQPREPQVYTLPPSRDELTKNQVSLTCLVKGFYP | |
| GGGSGGS- | SDIAVEWESNGQPENNYKTTPPVLDSDGSFFLYSKLTVDKSRWQQGNVFSCSV | |
| L_wt_del_APASSS_N88R- | MHEALHNHYTQKSLSLSPGKGGSPLGLAGGGSGGSTKKTQLQLEHLLLDLQMI | |
| GGSGGSGG | LNGINNYKNPKLTRMLTFKFYMPKKATELKHLQCLEEELKPLEEVLNLAQSKN | |
| SGGSGGA- | FHLRPRDLISRINVIVLELKGSETTFMCEYADETATIVEFLNRWITFSQSIIS | |
| R_D6A | TLTGGSGGSGGSGGSGGAELCDDAPPEIPHATFKAMAYKEGTMLNCECKRGFR | |
| | RIKSGSLYMLCTGNSSHSSWDNQCQCTSSATRNTTKQVTPQPEEQKERKTTEM | |
| | QSPMQPVDQASLPGHCREPPPWENEATERIYHFVVGQMVYYQCVQGYRALHRG | |
| | PAESVCKMTHGKTRWTQPQLICTGE | |
| Chain 2: | EPKSSDKTHTCPPCPAPEAAGGPSVFLFPPKPKDTLYITREPEVTCVVVDVSH | 423 |
| Fc(G1_AAA_C217S)_YTE- | EDPEVKFNWYVDGVEVHNAKTKPREEQYNSTYRVVSVLTVLHQDWLNGKEYKC | |
| GGSPLG | KVSNKALAAPIEKTISKAKGQPREPQVYTLPPSRDELTKNQVSLTCLVKGFYP | |
| | SDIAVEWESNGQPENNYKTTPPVLDSDGSFFLYSKLTVDKSRWQQGNVFSCSV | |
| | MHEALHNHYTQKSLSLSPGKGGSPLG | |
| Chain 3: | LAGGGSGGSTKKTQLQLEHLLLDLQMILNGINNYKNPKLTRMLTFKFYMPKKA | 424 |
| LAGGGSGG | TELKHLQCLEEELKPLEEVLNLAQSKNFHLRPRDLISRINVIVLELKGSETTF | |
| S- | MCEYADETATIVEFLNRWITFSQSIISTLTGGSGGSGGSGGSGGAELCDDAPP | |
| L_wt_del_APASSS_N88R- | EIPHATFKAMAYKEGTMLNCECKRGFRRIKSGSLYMLCTGNSSHSSWDNQCQC | |
| GGSGGSGG | TSSATRNTTKQVTPQPEEQKERKTTEMQSPMQPVDQASLPGHCREPPPWENEA | |
| SGGSGGA- | TERIYHFVVGQMVYYQCVQGYRALHRGPAESVCKMTHGKTRWTQPQLICTGE | |
| R_D6A | | |

P2012 Cleaved proteins (Complete MMP-2 cleavage)

| | | |
|---|---|---|
| Chains 1 | EPKSSDKTHTCPPCPAPEAAGGPSVFLFPPKPKDTLMISRTPEVTCVVVDVSH | 425 |
| and 2: | EDPEVKFNWYVDGVEVHNAKTKPREEQYNSTYRVVSVLTVLHQDWLNGKEYKC | |
| Fc(G1_AAA_C217S)_delK- | KVSNKALAAPIEKTISKAKGQPREPQVYTLPPSRDELTKNQVSLTCLVKGFYP | |
| GGSPLG | SDIAVEWESNGQPENNYKTTPPVLDSDGSFFLYSKLTVDKSRWQQGNVFSCSV | |
| | MHEALHNHYTQKSLSLSPGGGSPLG | |
| Chains 3 | LAGGGSAAASSSTKKTQLQLEHLLLDLQMILNGINNYKNPKLTRMLTFKFYMP | 426 |
| and 4: | KKATELKHLQCLEEELKPLEEALNLAPSKNFHLRPRDLISNINVIVLELKGSE | |
| LAGGGS-L_tm_P2A_T3A- | TTFMCEYADETATIVEFLNRWITFSQSTISTLTGGSGGSPLG | |
| GGSGGSPL | | |
| G | | |
| Chains 5 | LAGGGAELCDDDPPEIPHATFKAMAYKEGTMLNCECKRGFRRIKSGSLYMLCT | 427 |
| and 6: | GNSSHSSWDNQCQCTSSATRNTTKQVTPQPEEQKERKTTEMQSPMQPVDQASL | |
| LAGGGA-R | PGHCREPPPWENEATERIYHFVVGQMVYYQCVQGYRALHRGPAESVCKMTHGK | |
| | TRWTQPQLICTGE | |

P2012 Cleaved proteins (Product-1 from partial MMP-2 cleavage)

| | | |
|---|---|---|
| Chain 1: | EPKSSDKTHTCPPCPAPEAAGGPSVFLFPPKPKDTLMISRTPEVTCVVVDVSH | 428 |
| Fc(G1_AAA_C217S)_delK- | EDPEVKFNWYVDGVEVHNAKTKPREEQYNSTYRVVSVLTVLHQDWLNGKEYKC | |
| GGSPLGLA | KVSNKALAAPIEKTISKAKGQPREPQVYTLPPSRDELTKNQVSLTCLVKGFYP | |
| GGGS- | SDIAVEWESNGQPENNYKTTPPVLDSDGSFFLYSKLTVDKSRWQQGNVFSCSV | |
| L_tm_P2A_T3A- | MHEALHNHYTQKSLSLSPGGGSPLGLAGGGSAAASSSTKKTQLQLEHLLLDLQ | |
| GGSGGSPL | MILNGINNYKNPKLTRMLTFKFYMPKKATELKHLQCLEEELKPLEEALNLAPS | |
| GLAGGGA- | KNFHLRPRDLISNINVIVLELKGSETTFMCEYADETATIVEFLNRWITFSQST | |
| R | ISTLTGGSGGSPLGLAGGGAELCDDDPPEIPHATFKAMAYKEGTMLNCECKRG | |
| | FRRIKSGSLYMLCTGNSSHSSWDNQCQCTSSATRNTTKQVTPQPEEQKERKTT | |
| | EMQSPMQPVDQASLPGHCREPPPWENEATERIYHFVVGQMVYYQCVQGYRALH | |
| | RGPAESVCKMTHGKTRWTQPQLICTGE | |
| Chain 2: | EPKSSDKTHTCPPCPAPEAAGGPSVFLFPPKPKDTLMISRTPEVTCVVVDVSH | 429 |
| Fc(G1_AAA_C217S)_delK- | EDPEVKFNWYVDGVEVHNAKTKPREEQYNSTYRVVSVLTVLHQDWLNGKEYKC | |
| GGSPLG | KVSNKALAAPIEKTISKAKGQPREPQVYTLPPSRDELTKNQVSLTCLVKGFYP | |
| | SDIAVEWESNGQPENNYKTTPPVLDSDGSFFLYSKLTVDKSRWQQGNVFSCSV | |
| | MHEALHNHYTQKSLSLSPGGGSPLG | |
| Chain 3: | LAGGGSAAASSSTKKTQLQLEHLLLDLQMILNGINNYKNPKLTRMLTFKFYMP | 430 |
| LAGGGS- | KKATELKHLQCLEEELKPLEEALNLAPSKNFHLRPRDLISNINVIVLELKGSE | |
| L_tm_P2A_T3A- | TTFMCEYADETATIVEFLNRWITFSQSTISTLTGGSGGSPLGLAGGGAELCDD | |
| GGSGGSPL | DPPEIPHATFKAMAYKEGTMLNCECKRGFRRIKSGSLYMLCTGNSSHSSWDNQ | |
| GLAGGGA- | CQCTSSATRNTTKQVTPQPEEQKERKTTEMQSPMQPVDQASLPGHCREPPPWE | |
| R | NEATERIYHFVVGQMVYYQCVQGYRALHRGPAESVCKMTHGKTRWTQPQLICT | |
| | GE | |

P2012 Cleaved proteins (Product-2 from partial MMP-2 cleavage)

| | | |
|---|---|---|
| Chain 1: | EPKSSDKTHTCPPCPAPEAAGGPSVFLFPPKPKDTLMISRTPEVTCVVVDVSH | 431 |
| Fc(G1_AAA_C217S)_delK- | EDPEVKFNWYVDGVEVHNAKTKPREEQYNSTYRVVSVLTVLHQDWLNGKEYKC | |
| GGSPLGLA | KVSNKALAAPIEKTISKAKGQPREPQVYTLPPSRDELTKNQVSLTCLVKGFYP | |
| GGGS- | SDIAVEWESNGQPENNYKTTPPVLDSDGSFFLYSKLTVDKSRWQQGNVFSCSV | |
| L_tm_P2A_T3A- | MHEALHNHYTQKSLSLSPGGGSPLGLAGGGSAAASSSTKKTQLQLEHLLLDLQ | |
| GGSGGSPL | MILNGINNYKNPKLTRMLTFKFYMPKKATELKHLQCLEEELKPLEEALNLAPS | |
| GLAGGGA- | KNFHLRPRDLISNINVIVLELKGSETTFMCEYADETATIVEFLNRWITFSQST | |
| R | ISTLTGGSGGSPLGLAGGGAELCDDDPPEIPHATFKAMAYKEGTMLNCECKRG | |
| | FRRIKSGSLYMLCTGNSSHSSWDNQCQCTSSATRNTTKQVTPQPEEQKERKTT | |
| | EMQSPMQPVDQASLPGHCREPPPWENEATERIYHFVVGQMVYYQCVQGYRALH | |
| | RGPAESVCKMTHGKTRWTQPQLICTGE | |
| Chain 2: | EPKSSDKTHTCPPCPAPEAAGGPSVFLFPPKPKDTLMISRTPEVTCVVVDVSH | 432 |
| Fc(G1_AAA_C217S)_delK- | EDPEVKFNWYVDGVEVHNAKTKPREEQYNSTYRVVSVLTVLHQDWLNGKEYKC | |
| GGSPLGLA | KVSNKALAAPIEKTISKAKGQPREPQVYTLPPSRDELTKNQVSLTCLVKGFYP | |
| GGGS- | SDIAVEWESNGQPENNYKTTPPVLDSDGSFFLYSKLTVDKSRWQQGNVFSCSV | |
| L_tm_P2A_T3A- | MHEALHNHYTQKSLSLSPGGGSPLGLAGGGSAAASSSTKKTQLQLEHLLLDLQ | |
| GGSGGSPL | MILNGINNYKNPKLTRMLTFKFYMPKKATELKHLQCLEEELKPLEEALNLAPS | |
| G | KNFHLRPRDLISNINVIVLELKGSETTFMCEYADETATIVEFLNRWITFSQST | |
| | ISTLTGGSGGSPLG | |
| Chain 3: | LAGGGAELCDDDPPEIPHATFKAMAYKEGTMLNCECKRGFRRIKSGSLYMLCT | 433 |
| LAGGGA-R | GNSSHSSWDNQCQCTSSATRNTTKQVTPQPEEQKERKTTEMQSPMQPVDQASL | |
| | PGHCREPPPWENEATERIYHFVVGQMVYYQCVQGYRALHRGPAESVCKMTHGK | |
| | TRWTQPQLICTGE | |

P2012 Cleaved proteins (Product-3 from partial MMP-2 cleavage)

| | | |
|---|---|---|
| Chain 1: | EPKSSDKTHTCPPCPAPEAAGGPSVFLFPPKPKDTLMISRTPEVTCVVVDVSH | 434 |
| Fc(G1_AAA_C217S)_delK- | EDPEVKFNWYVDGVEVHNAKTKPREEQYNSTYRVVSVLTVLHQDWLNGKEYKC | |
| GGSPLGLA | KVSNKALAAPIEKTISKAKGQPREPQVYTLPPSRDELTKNQVSLTCLVKGFYP | |
| GGGS- | SDIAVEWESNGQPENNYKTTPPVLDSDGSFFLYSKLTVDKSRWQQGNVFSCSV | |
| L_tm_P2A_T3A- | MHEALHNHYTQKSLSLSPGGGSPLGLAGGGSAAASSSTKKTQLQLEHLLLDLQ | |
| GGSGGSPL | MILNGINNYKNPKLTRMLTFKFYMPKKATELKHLQCLEEELKPLEEALNLAPS | |
| GLAGGGA- | KNFHLRPRDLISNINVIVLELKGSETTFMCEYADETATIVEFLNRWITFSQST | |
| R | ISTLTGGSGGSPLGLAGGGAELCDDDPPEIPHATFKAMAYKEGTMLNCECKRG | |
| | FRRIKSGSLYMLCTGNSSHSSWDNQCQCTSSATRNTTKQVTPQPEEQKERKTT | |
| | EMQSPMQPVDQASLPGHCREPPPWENEATERIYHFVVGQMVYYQCVQGYRALH | |
| | RGPAESVCKMTHGKTRWTQPQLICTGE | |
| Chain 2: | EPKSSDKTHTCPPCPAPEAAGGPSVFLFPPKPKDTLMISRTPEVTCVVVDVSH | 435 |
| Fc(G1_AAA_C217S)_delK- | EDPEVKFNWYVDGVEVHNAKTKPREEQYNSTYRVVSVLTVLHQDWLNGKEYKC | |
| GGSPLG | KVSNKALAAPIEKTISKAKGQPREPQVYTLPPSRDELTKNQVSLTCLVKGFYP | |
| | SDIAVEWESNGQPENNYKTTPPVLDSDGSFFLYSKLTVDKSRWQQGNVFSCSV | |
| | MHEALHNHYTQKSLSLSPGGGSPLG | |
| Chain 3: | LAGGGSAAASSSTKKTQLQLEHLLLDLQMILNGINNYKNPKLTRMLTFKFYMP | 436 |
| LAGGGS- | KKATELKHLQCLEEELKPLEEALNLAPSKNFHLRPRDLISNINVIVLELKGSE | |
| L_tm_P2A_T3A- | TTFMCEYADETATIVEFLNRWITFSQSTISTLTGGSGGSPLG | |
| GGSGGSPL | | |
| G | | |
| Chain 4: | LAGGGAELCDDDPPEIPHATFKAMAYKEGTMLNCECKRGFRRIKSGSLYMLCT | 437 |
| LAGGGA-R | GNSSHSSWDNQCQCTSSATRNTTKQVTPQPEEQKERKTTEMQSPMQPVDQASL | |
| | PGHCREPPPWENEATERIYHFVVGQMVYYQCVQGYRALHRGPAESVCKMTHGK | |
| | TRWTQPQLICTGE | |

P2012 Cleaved proteins (Product-4 from partial MMP-2 cleavage)

| | | |
|---|---|---|
| Chain 1: | EPKSSDKTHTCPPCPAPEAAGGPSVFLFPPKPKDTLMISRTPEVTCVVVDVSH | 438 |
| Fc(G1_AAA_C217S)_delK- | EDPEVKFNWYVDGVEVHNAKTKPREEQYNSTYRVVSVLTVLHQDWLNGKEYKC | |
| GGSPLG | KVSNKALAAPIEKTISKAKGQPREPQVYTLPPSRDELTKNQVSLTCLVKGFYP | |
| | SDIAVEWESNGQPENNYKTTPPVLDSDGSFFLYSKLTVDKSRWQQGNVFSCSV | |
| | MHEALHNHYTQKSLSLSPGGGSPLG | |
| Chain 2: | LAGGGSAAASSSTKKTQLQLEHLLLDLQMILNGINNYKNPKLTRMLTFKFYMP | 439 |
| LAGGGS- | KKATELKHLQCLEEELKPLEEALNLAPSKNFHLRPRDLISNINVIVLELKGSE | |
| L_tm_P2A_T3A- | TTFMCEYADETATIVEFLNRWITFSQSTISTLTGGSGGSPLGLAGGGAELCDD | |
| GGSGGSPL | DPPEIPHATFKAMAYKEGTMLNCECKRGFRRIKSGSLYMLCTGNSSHSSWDNQ | |
| GLAGGGA- | CQCTSSATRNTTKQVTPQPEEQKERKTTEMQSPMQPVDQASLPGHCREPPPWE | |
| R | NEATERIYHFVVGQMVYYQCVQGYRALHRGPAESVCKMTHGKTRWTQPQLICT | |
| | GE | |
| Chain 3: | EPKSSDKTHTCPPCPAPEAAGGPSVFLFPPKPKDTLMISRTPEVTCVVVDVSH | 440 |
| Fc(G1_AAA_C217S)_delK- | EDPEVKFNWYVDGVEVHNAKTKPREEQYNSTYRVVSVLTVLHQDWLNGKEYKC | |
| GGSPLGLA | KVSNKALAAPIEKTISKAKGQPREPQVYTLPPSRDELTKNQVSLTCLVKGFYP | |
| GGGS- | SDIAVEWESNGQPENNYKTTPPVLDSDGSFFLYSKLTVDKSRWQQGNVFSCSV | |
| L_tm_P2A_T3A- | MHEALHNHYTQKSLSLSPGGGSPLGLAGGGSAAASSSTKKTQLQLEHLLLDLQ | |
| GGSGGSPL | MILNGINNYKNPKLTRMLTFKFYMPKKATELKHLQCLEEELKPLEEALNLAPS | |
| G | KNFHLRPRDLISNINVIVLELKGSETTFMCEYADETATIVEFLNRWITFSQST | |
| | ISTLTGGSGGSPLG | |
| Chain 4: | LAGGGAELCDDDPPEIPHATFKAMAYKEGTMLNCECKRGFRRIKSGSLYMLCT | 441 |
| LAGGGA-R | GNSSHSSWDNQCQCTSSATRNTTKQVTPQPEEQKERKTTEMQSPMQPVDQASL | |
| | PGHCREPPPWENEATERIYHFVVGQMVYYQCVQGYRALHRGPAESVCKMTHGK | |
| | TRWTQPQLICTGE | |

[0209] Thus, in certain embodiments, an activatable proprotein comprises a first polypeptide that comprises, consists, or consists essentially of an amino acid sequence that is at least 80, 85, 90, 95, 98, or 100% identical to a sequence selected from Table S4. In certain embodiments, the proteast cleavage site (e.g., the TEV protease cleavage site) of any one or more of the foregoing sequences (from Table S4) is replaced with a human protease cleavage site, that is, a cleavage site cleavable by a human protease, for example, a human protease expressed in a cancer tissue or cancer cell (see, for example, Table S3 for exemplary cleavable linkers).

### Methods of Use and Pharmaceutical Compositions

[0210] Certain embodiments include methods of treating, ameliorating the symptoms of, and/or reducing the progression of, a disease or condition in a subject in need thereof, comprising administering to the subject at least one activatable proprotein, as described herein. Also included are methods of enhancing an immune response in a subject comprising administering to the subject at least one activatable proprotein, as described herein. In particular embodiments, the disease is selected from one or more of a cancer, a viral infection, and an immune disorder.

[0211] In some embodiments, following administration, the activatable proprotein is activated through protease cleavage in a cell or tissue, which releases or opens the homodimer, exposes the binding site of the IL-2 proteins that binds to the IL-2Rβ/γc chain present on the surface of the immune cell in vitro or in vivo, and thereby generates an activated protein (see, for example, FIGS. 4A-4D). In particular embodiments, the protease cleavage occurs in a cancer cell or cancer tissue, or a virally-infected cell or virally-infected tissue. Typically, the activated protein has at least one immune-stimulating IL-2 activity, for example, by binding to the IL-2Rβ/γc chain present on the surface of an immune cell in vivo, and thereby stimulating the immune cell. In particular embodiments, the immune cell is selected from one or more of a T cell, a B cell, a natural killer cell, a monocyte, and a macrophage.

[0212] In some embodiments, administration and activation of the activatable proprotein, to generate an activated protein, increases an immune response in the subject by about or at least about 5, 10, 15, 20, 25, 30, 35, 40, 45, 50, 60, 70, 80, 90, 100, 200, 300, 400, 500, 600, 700, 800, 900, 1000, 2000% or more, relative to a control. In some instances, the immune response is an anti-cancer or anti-viral immune response. In some embodiments, administration and activation of the activatable proprotein, to generate an activated protein, increases cell-killing in the subject by about or at least about 5, 10, 15, 20, 25, 30, 35, 40, 45, 50, 60, 70, 80, 90, 100, 200, 300, 400, 500, 600, 700, 800, 900, 1000, 2000% or more, relative to a control. In some embodiments, wherein the cell-killing is cancer cell-killing or virally-infected cell-killing.

[0213] In some embodiments, administration and activation of the activatable proprotein, to generate an activated protein, does not significantly increase binding of the activated protein to the IL-2Rα/β/γc chain expressed on regulatory T cells (T_{regs}). For example, in certain activated proteins, the binding between the IL-2 protein and the IL-2 binding protein (for example, disulfide binding between the IL-2 protein and the IL-2Rα protein) is maintained following linker cleavage, masks the binding site of the IL-2 protein that binds to the IL-2Rα/β/γc chain expressed on T_{regs}, and thereby interferes with binding of the activated protein to T_{regs}. Thus, in certain embodiments, the activated protein does not significantly stimulate or enhance the proliferation and/or activation of (T_{regs}), relative to the activatable proprotein.

[0214] In some embodiments, the disease is a cancer, that is, the subject in need thereof has or is suspected of having a cancer. Certain embodiments thus include methods of treating, ameliorating the symptoms of, or inhibiting the progression of, a cancer in a subject in need thereof, comprising administering to the subject at least one activatable proprotein, as described herein. In particular embodiments, the cancer is a primary cancer or a metastatic cancer. In specific embodiments, the cancer is selected from one or more of melanoma (optionally metastatic melanoma), kidney cancer (optionally renal cell carcinoma), pancreatic cancer, bone cancer, prostate cancer, small cell lung cancer, non-small cell lung cancer (NSCLC), mesothelioma, leukemia (optionally lymphocytic leukemia, chronic myelogenous leukemia, acute myeloid leukemia, or relapsed acute myeloid leukemia), multiple myeloma, lymphoma, hepatoma (hepatocellular carcinoma), sarcoma, B-cell malignancy, breast cancer, ovarian cancer, colorectal cancer, glioma, glioblastoma multiforme, meningioma, pituitary adenoma, vestibular schwannoma, primary CNS lymphoma, primitive neuroectodermal tumor (medulloblastoma), bladder cancer, uterine cancer, esophageal cancer, brain cancer, head and neck cancers, cervical cancer, testicular cancer, thyroid cancer, and stomach cancer

[0215] In some embodiments, as noted above, the cancer is a metastatic cancer. Further to the above cancers, exemplary metastatic cancers include, without limitation, bladder cancers which have metastasized to the bone, liver, and/or lungs; breast cancers which have metastasized to the bone, brain, liver, and/or lungs; colorectal cancers which have metastasized to the liver, lungs, and/or peritoneum; kidney cancers which have metastasized to the adrenal glands, bone, brain, liver, and/or lungs; lung cancers which have metastasized to the adrenal glands, bone, brain, liver, and/or other lung sites; melanomas which have metastasized to the bone, brain, liver, lung, and/or skin/muscle; ovarian cancers which have metastasized to the liver, lung, and/or peritoneum; pancreatic cancers which have metastasized to the liver, lung, and/or peritoneum; prostate cancers which have metastasized to the adrenal glands, bone, liver, and/or lungs; stomach cancers which have metastasized to the liver, lung, and/or peritoneum; thyroid cancers which have metastasized to the bone, liver, and/or lungs; and uterine cancers which have metastasized to the bone, liver, lung, peritoneum, and/or vagina; among others.

[0216] The methods for treating cancers can be combined with other therapeutic modalities. For example, a combination therapy described herein can be administered to a subject before, during, or after other therapeutic interventions, including symptomatic care, radiotherapy, surgery, transplantation, hormone therapy, photodynamic therapy, antibiotic therapy, or any combination thereof. Symptomatic care includes administration of corticosteroids, to reduce cerebral edema, headaches, cognitive dysfunction, and emesis, and administration of anti-convulsants, to reduce seizures. Radiotherapy includes whole-brain irradiation, fractionated radiotherapy, and radiosurgery, such as stereotactic radiosurgery, which can be further combined with traditional surgery.

[0217] Certain embodiments thus include combination therapies for treating cancers, including methods of treating ameliorating the symptoms of, or inhibiting the progression of, a cancer in a subject in need thereof, comprising administering to the subject at least one activatable proprotein described herein in combination with at least one additional agent, for example, a chemotherapeutic agent, a hormonal therapeutic agent, and/or a kinase inhibitor. In some embodiments, administering the at least one activatable proprotein enhances the susceptibility of the cancer to the additional agent (for example, chemotherapeutic agent, hormonal therapeutic agent, and or kinase inhibitor) by about or at least about 5, 10, 15, 20, 25, 30, 35, 40, 45, 50, 60, 70, 80, 90, 100, 200, 300, 400, 500, 600, 700, 800, 900, 1000, 2000% or more relative to the additional agent alone.

[0218] Certain combination therapies employ one or more chemotherapeutic agents, for example, small molecule chemotherapeutic agents. Non-limiting examples of chemotherapeutic agents include alkylating agents, anti-metabolites, cytotoxic antibiotics, topoisomerase inhibitors (type 1 or type II), an anti-microtubule agents, among others.

[0219] Examples of alkylating agents include nitrogen mustards (e.g., mechlorethamine, cyclophosphamide, mustine, melphalan, chlorambucil, ifosfamide , and busulfan), nitrosoureas (e.g., N-Nitroso-N-methylurea (MNU), carmustine (BCNU), lomustine (CCNU), semustine (MeCCNU), fotemustine, and streptozotocin), tetrazines (e.g., dacarbazine, mitozolomide, and temozolomide), aziridines (e.g., thiotepa, mytomycin, and diaziquone (AZQ)), cisplatins and derivatives thereof (e.g., carboplatin and oxaliplatin), and non-classical alkylating agents (optionally procarbazine and hexamethylmelamine)

[0220] Examples of anti-metabolites include anti-folates (e.g., methotrexate and pemetrexed), fluoropyrimidines (e.g., 5-fluorouracil and capecitabine), deoxynucleoside analogues (e.g., ancitabine, enocitabine, cytarabine, gemcitabine, decitabine, azacitidine, fludarabine, nelarabine, cladribine, clofarabine, fludarabine, and pentostatin), and thiopurines (e.g., thioguanine and mercaptopurine);

[0221] Examples of cytotoxic antibiotics include anthracyclines (e.g., doxorubicin, daunorubicin, epirubicin, idarubicin, pirarubicin, aclarubicin, and mitoxantrone), bleomycins, mitomycin C, mitoxantrone, and actinomycin. Examples of topoisomerase inhibitors include camptothecin, irinotecan, topotecan, etoposide, doxorubicin, mitoxantrone, teniposide, novobiocin, merbarone, and aclarubicin.

[0222] Examples of anti-microtubule agents include taxanes (e.g., paclitaxel and docetaxel) and vinca alkaloids (e.g., vinblastine, vincristine, vindesine, vinorelbine).

[0223] The skilled artisan will appreciate that the various chemotherapeutic agents described herein can be combined with any one or more of the activatable proproteins described herein, and used according to any one or more of the methods or compositions described herein.

[0224] Certain combination therapies employ at least one hormonal therapeutic agent. General examples of hormonal therapeutic agents include hormonal agonists and hormonal antagonists. Particular examples of hormonal agonists include progestogen (progestin), corticosteroids (e.g., prednisolone, methylprednisolone, dexamethasone), insulin like growth factors, VEGF derived angiogenic and lymphangiogenic factors (e.g., VEGF-A, VEGF-A145, VEGF-A165, VEGF-C, VEGF-D, PIGF-2), fibroblast growth factor (FGF), galectin, hepatocyte growth factor (HGF), platelet derived growth factor (PDGF), transforming growth factor (TGF)-beta, androgens, estrogens, and somatostatin analogs. Examples of hormonal antagonists include hormone synthesis inhibitors such as aromatase inhibitors and gonadotropin-releasing hormone (GnRH)s agonists (e.g., leuprolide, goserelin, triptorelin, histrelin) including analogs thereof. Also included are hormone receptor antagonist such as selective estrogen receptor modulators (SERMs; e.g., tamoxifen, raloxifene, toremifene) and anti-androgens (e.g., flutamide, bicalutamide, nilutamide).

[0225] Also included are hormonal pathway inhibitors such as antibodies directed against hormonal receptors. Examples include inhibitors of the IGF receptor (e.g., IGF-IR1) such as cixutumumab, dalotuzumab, figitumumab, ganitumab, istiratumab, and robatumumab; inhibitors of the vascular endothelial growth factor receptors 1, 2 or 3 (VEGFR1, VEGFR2 or VEGFR3) such as alacizumab pegol, bevacizumab, icrucumab, ramucirumab; inhibitors of the TGF-beta receptors R1, R2, and R3 such as fresolimumab and metelimumab; inhibitors of c-Met such as naxitamab; inhibitors of the EGF receptor such as cetuximab, depatuxizumab mafodotin, futuximab, imgatuzumab, laprituximab emtansine, matuzumab, modotuximab, necitumumab, nimotuzumab, panitumumab, tomuzotuximab, and zalutumumab; inhibitors of the FGF receptor such as aprutumab, ixadotin, and bemarituzumab; and inhibitors of the PDGF receptor such as olaratumab and tovetumab.

[0226] The skilled artisan will appreciate that the various hormonal therapeutic agents described herein can be combined with any one or more of the various activatable proproteins described herein, and used according to any one or more of the methods or compositions described herein.

[0227] Certain combination therapies employ at least one kinase inhibitor, including tyrosine kinase inhibitors. Examples of kinase inhibitors include, without limitation, adavosertib, afanitib, aflibercept, axitinib, bevacizumab, bosutinib, cabozantinib, cetuximab, cobimetinib, crizotinib, dasatinib, entrectinib, erdafitinib, erlotinib, fostamitinib, gefitinib, ibrutinib, imatinib, lapatinib, lenvatinib, mubritinib, nilotinib, panitumumab, pazopanib, pegaptanib, ponatinib, ranibizumab, regorafenib, ruxolitinib, sorafenib, sunitinib, SU6656, tofacitinib, trastuzumab, vandetanib, and vemuafenib.

[0228] The skilled artisan will appreciate that the various kinase inhibitors described herein can be combined with any one or more of the various activatable proproteins described herein, and used according to any one or more of the methods or compositions described herein.

[0229] In some embodiments, the methods and pharmaceutical compositions described herein increase median survival time of a subject by 4 weeks, 5 weeks, 6 weeks, 7 weeks, 8 weeks, 9 weeks, 10 weeks, 15 weeks, 20 weeks, 25 weeks, 30 weeks, 40 weeks, or longer. In certain embodiments, the methods and pharmaceutical compositions described herein increase median survival time of a subject by 1 year, 2 years, 3 years, or longer. In some embodiments, the methods and pharmaceutical compositions increase progression-free survival by 2 weeks, 3 weeks, 4 weeks, 5 weeks, 6 weeks, 7 weeks, 8 weeks, 9 weeks, 10 weeks or longer. In certain embodiments, the methods and pharmaceutical compositions described herein increase progression-free survival by 1 year, 2 years, 3 years, or longer.

[0230] In certain embodiments, the methods and therapeutic compositions described herein are sufficient to result in tumor regression, as indicated by a statistically significant decrease in the amount of viable tumor, for example, at least a 10%, 20%, 30%, 40%, 50% or greater decrease in tumor mass, or by altered (e.g., decreased with statistical significance) scan dimensions. In certain embodiments, the methods and therapeutic compositions described herein are sufficient to result in stable disease.

[0231] In some embodiments, the disease is a viral disease or viral infection. In certain embodiments, the viral infection is selected from one or more of human immunodeficiency virus (HIV), Hepatitis A, Hepatitis B, Hepatitis C, Hepatitis E, Caliciviruses associated diarrhoea, Rotavirus diarrhoea, Haemophilus influenzae B pneumonia and invasive disease, influenza, measles, mumps, rubella, Parainfluenza associated pneumonia, Respiratory syncytial virus (RSV) pneumonia, Severe Acute Respiratory Syndrome (SARS), Human papillomavirus, Herpes simplex type 2 genital ulcers, Dengue Fever, Japanese encephalitis, Tick-borne encephalitis, West-Nile virus associated disease, Yellow Fever, Epstein-Barr virus, Lassa fever, Crimean-Congo haemorrhagic fever, Ebola haemorrhagic fever, Marburg haemorrhagic fever, Rabies, Rift Valley fever, Smallpox, upper and lower respiratory infections, and poliomyelitis. In specific embodiments, the subject is HIV-positive. In some embodiments, the methods and pharmaceutical compositions described herein increase an anti-viral immune response by about or at least about 5, 10, 15, 20, 25, 30, 35, 40, 45, 50, 60, 70, 80, 90, 100, 200, 300, 400, 500, 600, 700, 800, 900, 1000, 2000% or more, relative to a control.

[0232] In some embodiments, the immune disorder is selected from one or more of type 1 diabetes, vasculitis, and an immunodeficiency. In some embodiments, the methods and pharmaceutical compositions described herein improve immune function in the subject, for example, by about or at least about 5, 10, 15, 20, 25, 30, 35, 40, 45, 50, 60, 70, 80, 90, 100, 200, 300, 400, 500, 600, 700, 800, 900, 1000, 2000% or more, relative to a control.

[0233] In certain embodiments, the methods and therapeutic compositions described herein are sufficient to result in clinically relevant reduction in symptoms of a particular disease indication known to the skilled clinician.

[0234] For in vivo use, as noted above, for the treatment of human or non-human mammalian disease or testing, the agents described herein are generally incorporated into one or more therapeutic or pharmaceutical compositions prior to administration, including veterinary therapeutic compositions.

[0235] Thus, certain embodiments relate to pharmaceutical or therapeutic compositions that comprise at least one activatable proprotein, as described herein. In some instances, a pharmaceutical or therapeutic composition comprises one or more of the activatable proproteins described herein in combination with a pharmaceutically- or physiologically-acceptable carrier or excipient. Certain pharmaceutical or therapeutic compositions further comprise at least one additional agent, for example, a chemotherapeutic agent, a hormonal therapeutic agent, and/or a kinase inhibitor as described herein.

[0236] Some therapeutic compositions comprise (and certain methods utilize) only one activatable proprotein. Certain therapeutic compositions comprise (and certain methods utilize) a mixture of at least two, three, four, or five different activatable proproteins.

[0237] In particular embodiments, the pharmaceutical or therapeutic compositions comprising at least one activatable proprotein is substantially pure on a protein basis or a weight-weight basis, for example, the composition has a purity of at least about 80%, 85%, 90%, 95%, 98%, or 99% on a protein basis or a weight-weight basis.

[0238] In certain embodiments, the first and second polypeptides, prior to cleavage, are substantially in homodimeric form in a composition or other physiological solution, or under physiological conditions, for example, in vivo conditions.

[0239] In some embodiments, the activatable proproteins described herein do not form aggregates, have a desired solubility, and/or have an immunogenicity profile that is suitable for use in humans, as known in the art. Thus, in some embodiments, the therapeutic composition comprising an activatable proprotein is substantially aggregate-free. For example, certain compositions comprise less than about 10% (on a protein basis) high molecular weight aggregated proteins, or less than about 5% high molecular weight aggregated proteins, or less than about 4% high molecular weight aggregated proteins, or less than about 3% high molecular weight aggregated proteins, or less than about 2% high molecular weight aggregated proteins, or less than about 1% high molecular weight aggregated proteins. Some compositions comprise an activatable proprotein that is at least about 50%, about 60%, about 70%, about 80%, about 90% or about 95% monodisperse with respect to its apparent molecular mass.

[0240] In some embodiments, the activatable proprotein are concentrated to about or at least about 0.1 mg/ml, 0.2 mg/ml, 0.3 mg/ml, 0.4 mg/ml, 0.5 mg/ml, 0.6, 0.7, 0.8, 0.9, 1 mg/ml, 2 mg/ml, 3 mg/ml, 4 mg/ml, 5 mg/ml, 6 mg/ml, 7 mg/ml, 8 mg/ml, 9 mg/ml, 10 mg/ml, 11, 12, 13, 14 or 15 mg/ml and are formulated for biotherapeutic uses.

[0241] To prepare a therapeutic or pharmaceutical composition, an effective or desired amount of one or more agents is mixed with any pharmaceutical carrier(s) or excipient known to those skilled in the art to be suitable for the particular agent and/or mode of administration. A pharmaceutical carrier may be liquid, semi-liquid or solid. Solutions or suspensions used for parenteral, intradermal, subcutaneous or topical application may include, for example, a sterile diluent (such as water), saline solution (e.g., phosphate buffered saline; PBS), fixed oil, polyethylene glycol, glycerin, propylene glycol or other synthetic solvent; antimicrobial agents (such as benzyl alcohol and methyl parabens); antioxidants (such as ascorbic acid and sodium bisulfite) and chelating agents (such as ethylenediaminetetraacetic acid (EDTA)); buffers (such as acetates, citrates and phosphates). If administered intravenously (e.g., by IV infusion), suitable carriers include physiological saline or phosphate buffered saline (PBS), and solutions containing thickening and solubilizing agents, such as glucose, polyethylene glycol, polypropylene glycol and mixtures thereof.

[0242] Administration of agents described herein, in pure form or in an appropriate therapeutic or pharmaceutical composition, can be carried out via any of the accepted modes of administration of agents for serving similar utilities. The therapeutic or pharmaceutical compositions can be prepared by combining an agent-containing composition with an appropriate physiologically acceptable carrier, diluent or excipient, and may be formulated into preparations in solid, semi-solid, liquid or gaseous forms, such as tablets, capsules, powders, granules, ointments, solutions, suppositories, injections, inhalants, gels, microspheres, and aerosols. In addition, other pharmaceutically active ingredients (including other small molecules as described elsewhere herein) and/or suitable excipients such as salts, buffers and stabilizers may, but need not, be present within the composition.

[0243] Administration may be achieved by a variety of different routes, including oral, parenteral, nasal, intravenous, intradermal, intramuscular, subcutaneous or topical. Preferred modes of administration depend upon the nature of the condition to be treated or prevented. Particular embodiments include administration by IV infusion.

[0244] Carriers can include, for example, pharmaceutically- or physiologically-acceptable carriers, excipients, or stabilizers that are non-toxic to the cell or mammal being exposed thereto at the dosages and concentrations employed. Often the physiologically-acceptable carrier is an aqueous pH buffered solution. Examples of physiologically acceptable carriers include buffers such as phosphate, citrate, and other organic acids; antioxidants including ascorbic acid; low molecular weight (less than about 10 residues) polypeptide; proteins, such as serum albumin, gelatin, or immunoglobulins; hydrophilic polymers such as polyvinylpyrrolidone; amino acids such as glycine, glutamine, asparagine, arginine or lysine; monosaccharides, disaccharides, and other carbohydrates including glucose, mannose, or dextrins; chelating agents such as EDTA; sugar alcohols such as mannitol or sorbitol; salt-forming counterions such as sodium; and/or nonionic surfactants such as polysorbate 20 (TWEEN™) polyethylene glycol (PEG), and poloxamers (PLURONICS™), and the like.

[0245] In some embodiments, one or more agents can be entrapped in microcapsules prepared, for example, by coacervation techniques or by interfacial polymerization (for example, hydroxymethylcellulose or gelatin-microcapsules and poly-(methylmethacylate)microcapsules, respectively), in colloidal drug delivery systems (for example, liposomes, albumin microspheres, microemulsions, nano-particles and nanocapsules), or in macroemulsions. Such techniques are disclosed in Remington's Pharmaceutical Sciences, 16th edition, Oslo, A., Ed., (1980). The particle(s) or liposomes may further comprise other therapeutic or diagnostic agents.

[0246] The precise dosage and duration of treatment is a function of the disease being treated and may be determined empirically using known testing protocols or by testing the compositions in model systems known in the art and extrapolating therefrom. Controlled clinical trials may also be performed. Dosages may also vary with the severity of the condition to be alleviated. A pharmaceutical composition is generally formulated and administered to exert a therapeutically useful effect while minimizing undesirable side effects. The composition may be administered one time, or may be divided into a number of smaller doses to be administered at intervals of time. For any particular subject, specific dosage regimens may be adjusted over time according to the individual need.

[0247] Typical routes of administering these and related therapeutic or pharmaceutical compositions thus include, without limitation, oral, topical, transdermal, inhalation, parenteral, sublingual, buccal, rectal, vaginal, and intranasal. The term parenteral as used herein includes subcutaneous injections, intravenous, intramuscular, intrasternal injection or infusion techniques. Therapeutic or pharmaceutical compositions according to certain embodiments of the present disclosure are formulated so as to allow the active ingredients contained therein to be bioavailable upon administration of the composition to a subject or patient. Compositions that will be administered to a subject or patient may take the form of one or more dosage units, where for example, a tablet may be a single dosage unit, and a container of a herein described agent in aerosol form may hold a plurality of dosage units. Actual methods of preparing such dosage forms are known, or will be apparent, to those skilled in this art; for example, see Remington: The Science and Practice of Pharmacy, 20th Edition (Philadelphia College of Pharmacy and Science, 2000). The composition to be administered will typically contain a therapeutically effective amount of an agent described herein, for treatment of a disease or condition of interest.

[0248] A therapeutic or pharmaceutical composition may be in the form of a solid or liquid. In one embodiment, the carrier(s) are particulate, so that the compositions are, for example, in tablet or powder form. The carrier(s) may be liquid, with the compositions being, for example, an oral oil, injectable liquid or an aerosol, which is useful in, for example, inhalatory administration. When intended for oral administration, the pharmaceutical composition is preferably in either solid or liquid form, where semi-solid, semi-liquid, suspension and gel forms are included within the forms considered herein as either solid or liquid. Certain embodiments include sterile, injectable solutions.

[0249] As a solid composition for oral administration, the pharmaceutical composition may be formulated into a powder, granule, compressed tablet, pill, capsule, chewing gum, wafer or the like. Such a solid composition will typically contain one or more inert diluents or edible carriers. In addition, one or more of the following may be present: binders such as carboxymethylcellulose, ethyl cellulose, microcrystalline cellulose, gum tragacanth or gelatin; excipients such as starch, lactose or dextrins, disintegrating agents such as alginic acid, sodium alginate, Primogel, corn starch and the like; lubricants such as magnesium stearate or Sterotex; glidants such as colloidal silicon dioxide; sweetening agents such as sucrose or saccharin; a flavoring agent such as peppermint, methyl salicylate or orange flavoring; and a coloring agent. When the pharmaceutical composition is in the form of a capsule, for example, a gelatin capsule, it may contain, in addition to materials of the above type, a liquid carrier such as polyethylene glycol or oil.

[0250] The therapeutic or pharmaceutical composition may be in the form of a liquid, for example, an elixir, syrup, solution, emulsion or suspension. The liquid may be for oral administration or for delivery by injection, as two examples. When intended for oral administration, preferred composition contain, in addition to the present compounds, one or more of a sweetening agent, preservatives, dye/colorant and flavor enhancer. In a composition intended to be administered by injection, one or more of a surfactant, preservative, wetting agent, dispersing agent, suspending agent, buffer, stabilizer and isotonic agent may be included.

[0251] The liquid therapeutic or pharmaceutical compositions, whether they be solutions, suspensions or other like form, may include one or more of the following adjuvants: sterile diluents such as water for injection, saline solution, preferably physiological saline, Ringer's solution, isotonic sodium chloride, fixed oils such as synthetic mono or diglycerides which may serve as the solvent or suspending medium, polyethylene glycols, glycerin, propylene glycol or other solvents; antibacterial agents such as benzyl alcohol or methyl paraben; antioxidants such as ascorbic acid or sodium bisulfite; chelating agents such as ethylenediaminetetraacetic acid; buffers such as acetates, citrates or phosphates and agents for the adjustment of tonicity such as sodium chloride or dextrose. The parenteral preparation can be enclosed in ampoules, disposable syringes or multiple dose vials made of glass or plastic. Physiological saline is a preferred adjuvant. An injectable pharmaceutical composition is preferably sterile.

[0252] A liquid therapeutic or pharmaceutical composition intended for either parenteral or oral administration should contain an amount of an agent such that a suitable dosage will be obtained. Typically, this amount is at least 0.01% of the agent of interest in the composition. When intended for oral administration, this amount may be varied to be between 0.1 and about 70% of the weight of the composition. Certain oral therapeutic or pharmaceutical compositions contain between about 4% and about 75% of the agent of interest. In certain embodiments, therapeutic or pharmaceutical compositions and preparations are prepared so that a parenteral dosage unit contains between 0.01 to 10% by weight of the agent of interest prior to dilution.

[0253] The therapeutic or pharmaceutical compositions may be intended for topical administration, in which case the carrier may suitably comprise a solution, emulsion, ointment or gel base. The base, for example, may comprise one or more of the following: petrolatum, lanolin, polyethylene glycols, bee wax, mineral oil, diluents such as water and alcohol, and emulsifiers and stabilizers. Thickening agents may be present in a therapeutic or pharmaceutical composition for topical administration. If intended for transdermal administration, the composition may include a transdermal patch or iontophoresis device.

[0254] The therapeutic or pharmaceutical compositions may be intended for rectal administration, in the form, for example, of a suppository, which will melt in the rectum and release the drug. The composition for rectal administration may contain an oleaginous base as a suitable nonirritating excipient. Such bases include, without limitation, lanolin, cocoa butter, and polyethylene glycol.

[0255] The therapeutic or pharmaceutical composition may include various materials, which modify the physical form of a solid or liquid dosage unit. For example, the composition may include materials that form a coating shell around the active ingredients. The materials that form the coating shell are typically inert, and may be selected from, for example, sugar, shellac, and other enteric coating agents. Alternatively, the active ingredients may be encased in a gelatin capsule. The therapeutic or pharmaceutical compositions in solid or liquid form may include a component that binds to agent and thereby assists in the delivery of the compound. Suitable components that may act in this capacity include monoclonal or polyclonal antibodies, one or more proteins or a liposome.

[0256] The therapeutic or pharmaceutical composition may consist essentially of dosage units that can be administered as an aerosol. The term aerosol is used to denote a variety of systems ranging from those of colloidal nature to systems consisting of pressurized packages. Delivery may be by a liquefied or compressed gas or by a suitable pump system that dispenses the active ingredients. Aerosols may be delivered in single phase, bi-phasic, or tri-phasic systems in order to deliver the active ingredient(s). Delivery of the aerosol includes the necessary container, activators, valves, subcontainers, and the like, which together may form a kit. One of ordinary skill in the art, without undue experimentation may determine preferred aerosols.

[0257] The compositions described herein may be prepared with carriers that protect the agents against rapid elimination from the body, such as time release formulations or coatings. Such carriers include controlled release formulations, such as, but not limited to, implants and microencapsulated delivery systems, and biodegradable, biocompatible polymers, such as ethylene vinyl acetate, polyanhydrides, polyglycolic acid, polyorthoesters, polylactic acid and others known to those of ordinary skill in the art.

[0258] The therapeutic or pharmaceutical compositions may be prepared by methodology well known in the pharmaceutical art. For example, a therapeutic or pharmaceutical composition intended to be administered by injection may comprise one or more of salts, buffers and/or stabilizers, with sterile, distilled water so as to form a solution. A surfactant may be added to facilitate the formation of a homogeneous solution or suspension. Surfactants are compounds that non-covalently interact with the agent so as to facilitate dissolution or homogeneous suspension of the agent in the aqueous delivery system.

[0259] The therapeutic or pharmaceutical compositions may be administered in a therapeutically effective amount, which will vary depending upon a variety of factors including the activity of the specific compound employed; the metabolic stability and length of action of the compound; the age, body weight, general health, sex, and diet of the subject; the mode and time of administration; the rate of excretion; the drug combination; the severity of the particular disorder or condition; and the subject undergoing therapy. In some instances, a therapeutically effective daily dose is (for a 70 kg mammal) from about 0.001 mg/kg (i.e., ˜0.07 mg) to about 100 mg/kg (i.e., ˜7.0 g); preferably a therapeutically effective dose is (for a 70 kg mammal) from about 0.01 mg/kg (i.e., ˜0.7 mg) to about 50 mg/kg (i.e., ˜3.5 g); more preferably a therapeutically effective dose is (for a 70 kg mammal) from about 1 mg/kg (i.e., ˜70 mg) to about 25 mg/kg (i.e., ˜1.75 g). In some embodiments, the therapeutically effective dose is administered on a weekly, bi-weekly, or monthly basis. In specific embodiments, the therapeutically effective dose is administered on a weekly, bi-weekly, or monthly basis, for example, at a dose of about 1-10 or 1-5 mg/kg, or about 1, 2, 3, 4, 5, 6, 7, 8, 9, or 10 mg/kg.

[0260] The combination therapies described herein may include administration of a single pharmaceutical dosage formulation, which contains an activatable proprotein and an additional therapeutic agent (e.g., chemotherapeutic agent, hormonal therapeutic agent, kinase inhibitor), as well as administration of compositions comprising an activatable proprotein and an additional therapeutic agent in its own separate pharmaceutical dosage formulation. For example, an activatable proprotein and additional therapeutic agent can be administered to the subject together in a single oral dosage composition such as a tablet or capsule, or each agent administered in separate oral dosage formulations Similarly, an activatable proprotein and additional therapeutic agent can be administered to the subject together in a single parenteral dosage composition such as in a saline solution or other physiologically acceptable solution, or each agent administered in separate parenteral dosage formulations. As another example, for cell-based therapies, an activatable proprotein can be mixed with the cells prior to administration, administered as part of a separate composition, or both. Where separate dosage formulations are used, the compositions can be administered at essentially the same time, i.e., concurrently, or at separately staggered times, i.e., sequentially and in any order; combination therapy is understood to include all these regimens.

[0261] Also included are patient care kits, comprising (a) at least one activatable proprotein, as described herein; and optionally (b) at least one additional therapeutic agent (e.g., chemotherapeutic agent, hormonal therapeutic agent, kinase inhibitor). In certain kits, (a) and (b) are in separate therapeutic compositions. In some kits, (a) and (b) are in the same therapeutic composition.

[0262] The kits herein may also include a one or more additional therapeutic agents or other components suitable or desired for the indication being treated, or for the desired diagnostic application. The kits herein can also include one or more syringes or other components necessary or desired to facilitate an intended mode of delivery (e.g., stents, implantable depots, etc.).

[0263] In some embodiments, a patient care kit contains separate containers, dividers, or compartments for the composition(s) and informational material(s). For example, the composition(s) can be contained in a bottle, vial, or syringe, and the informational material(s) can be contained in association with the container. In some embodiments, the separate elements of the kit are contained within a single, undivided container. For example, the composition is contained in a bottle, vial or syringe that has attached thereto the informational material in the form of a label. In some embodiments, the kit includes a plurality (e.g., a pack) of individual containers, each containing one or more unit dosage forms (e.g., a dosage form described herein) of an activatable proprotein and optionally at least one additional therapeutic agent. For example, the kit includes a plurality of syringes, ampules, foil packets, or blister packs, each containing a single unit dose of an activatable proprotein and optionally at least one additional therapeutic agent. The containers of the kits can be air tight, waterproof (e.g., impermeable to changes in moisture or evaporation), and/or light-tight.

[0264] The patient care kit optionally includes a device suitable for administration of the composition, e.g., a syringe, inhalant, dropper (e.g., eye dropper), swab (e.g., a cotton swab or wooden swab), or any such delivery device. In some embodiments, the device is an implantable device that dispenses metered doses of the agent(s). Also included are methods of providing a kit, e.g., by combining the components described herein.

[0265] Expression and Purification Systems

[0266] Certain embodiments include methods and related compositions for expressing and purifying an activatable proprotein described herein. Such recombinant activatable proproteins can be conveniently prepared using standard protocols as described for example in Sambrook, et al., (1989, supra), in particular Sections 16 and 17; Ausubel et al., (1994, supra), in particular Chapters 10 and 16; and Coligan et al., Current Protocols in Protein Science (John Wiley & Sons, Inc. 1995-1997), in particular Chapters 1, 5 and 6. As one general example, activatable proproteins may be prepared by a procedure including one or more of the steps of: (a) preparing one or more vectors or constructs comprising one or more polynucleotide sequences that encode an individual polypeptide chain of the homodimer, which are operably linked to one or more regulatory elements; (b) introducing the one or more vectors or constructs into one or more host cells; (c) culturing the one or more host cell to express the polypeptides, which bind together to form an activatable proprotein homodimer; and (d) isolating the activatable proprotein homodimer from the host cell. Alternatively, the polypeptide chain can be first isolated and produced in a host cell, and then incubated under suitable conditions to form an activatable proprotein homodimer.

[0267] To express a desired polypeptide, a nucleotide sequence encoding a first and/or second polypeptide chain of an activatable proprotein may be inserted into appropriate expression vector(s), i.e., vector(s) which contain the necessary elements for the transcription and translation of the inserted coding sequence. Methods which are well known to those skilled in the art may be used to construct expression vectors containing sequences encoding a polypeptide of interest and appropriate transcriptional and translational control elements. These methods include in vitro recombinant DNA techniques, synthetic techniques, and in vivo genetic recombination. Such techniques are described in Sambrook et al., Molecular Cloning, A Laboratory Manual (1989), and Ausubel et al., Current Protocols in Molecular Biology (1989).

[0268] A variety of expression vector/host systems are known and may be utilized to contain and express polynucleotide sequences. These include, but are not limited to, microorganisms such as bacteria transformed with recombinant bacteriophage, plasmid, or cosmid DNA expression vectors; yeast transformed with yeast expression vectors; insect cell systems infected with virus expression vectors (e.g., baculovirus); plant cell systems transformed with virus expression vectors (e.g., cauliflower mosaic virus, CaMV; tobacco mosaic virus, TMV) or with bacterial expression vectors (e.g., Ti or pBR322 plasmids); or animal cell systems, including mammalian cell and more specifically human cell systems.

[0269] The “control elements” or “regulatory sequences” present in an expression vector are those non-translated regions of the vector—enhancers, promoters, 5′ and 3′ untranslated regions—which interact with host cellular proteins to carry out transcription and translation. Such elements may vary in their strength and specificity. Depending on the vector system and host utilized, any number of suitable transcription and translation elements, including constitutive and inducible promoters, may be used. For example, when cloning in bacterial systems, inducible promoters such as the hybrid lacZ promoter of the PBLUESCRIPT phagemid (Stratagene, La Jolla, Calif.) or PSPORT1 plasmid (Gibco BRL, Gaithersburg, Md.) and the like may be used. In mammalian cell systems, promoters from mammalian genes or from mammalian viruses are generally preferred. If it is necessary to generate a cell line that contains multiple copies of the sequence encoding a polypeptide, vectors based on SV40 or EBV may be advantageously used with an appropriate selectable marker.

[0270] In bacterial systems, a number of expression vectors may be selected depending upon the use intended for the expressed polypeptide. For example, when large quantities are needed, vectors which direct high level expression of fusion proteins that are readily purified may be used. Such vectors include, but are not limited to, the multifunctional E. coli cloning and expression vectors such as BLUESCRIPT (Stratagene), in which the sequence encoding the polypeptide of interest may be ligated into the vector in frame with sequences for the amino-terminal Met and the subsequent 7 residues of β-galactosidase so that a hybrid protein is produced; pIN vectors (Van Heeke & Schuster, J. Biol. Chem. 264:5503 5509 (1989)); and the like. pGEX Vectors (Promega, Madison, Wis.) may also be used to express foreign polypeptides as fusion proteins with glutathione S-transferase (GST). In general, such fusion proteins are soluble and can easily be purified from lysed cells by adsorption to glutathione-agarose beads followed by elution in the presence of free glutathione. Proteins made in such systems may be designed to include heparin, thrombin, or factor XA protease cleavage sites so that the cloned polypeptide of interest can be released from the GST moiety at will.

[0271] Certain embodiments employ E. coli-based expression systems (see, e.g., Structural Genomics Consortium et al., Nature Methods. 5:135-146, 2008). These and related embodiments may rely partially or totally on ligation-independent cloning (LIC) to produce a suitable expression vector. In specific embodiments, protein expression may be controlled by a T7 RNA polymerase (e.g., pET vector series). These and related embodiments may utilize the expression host strain BL21(DE3), a λDE3 lysogen of BL21 that supports T7-mediated expression and is deficient in lon and ompT proteases for improved target protein stability. Also included are expression host strains carrying plasmids encoding tRNAs rarely used in E. coli, such as ROSETTA™ (DE3) and Rosetta 2 (DE3) strains. Cell lysis and sample handling may also be improved using reagents sold under the trademarks BENZONASE® nuclease and BUGBUSTER® Protein Extraction Reagent. For cell culture, auto-inducing media can improve the efficiency of many expression systems, including high-throughput expression systems. Media of this type (e.g., OVERNIGHT EXPRESS™ Autoinduction System) gradually elicit protein expression through metabolic shift without the addition of artificial inducing agents such as IPTG. Particular embodiments employ hexahistidine tags (such as those sold under the trademark HIS⋅TAG® fusions), followed by immobilized metal affinity chromatography (IMAC) purification, or related techniques. In certain aspects, however, clinical grade proteins can be isolated from E. coli inclusion bodies, without or without the use of affinity tags (see, e g , Shimp et al., Protein Expr Purif. 50:58-67, 2006). As a further example, certain embodiments may employ a cold-shock induced E. coli high-yield production system, because over-expression of proteins in Escherichia coli at low temperature improves their solubility and stability (see, e.g., Qing et al., Nature Biotechnology. 22:877-882, 2004).

[0272] Also included are high-density bacterial fermentation systems. For example, high cell density cultivation of Ralstonia eutropha allows protein production at cell densities of over 150 g/L, and the expression of recombinant proteins at titers exceeding 10 g/L.

[0273] In the yeast Saccharomyces cerevisiae, a number of vectors containing constitutive or inducible promoters such as alpha factor, alcohol oxidase, and PGH may be used. For reviews, see Ausubel et al. (supra) and Grant et al., Methods Enzymol. 153:516-544 (1987). Also included are Pichia pandoris expression systems (see, e.g., Li et al., Nature Biotechnology. 24, 210-215, 2006; and Hamilton et al., Science, 301:1244, 2003). Certain embodiments include yeast systems that are engineered to selectively glycosylate proteins, including yeast that have humanized N-glycosylation pathways, among others (see, e.g., Hamilton et al., Science. 313:1441-1443, 2006; Wildt et al., Nature Reviews Microbiol. 3:119-28, 2005; and Gerngross et al., Nature-Biotechnology. 22:1409-1414, 2004; U.S. Pat. Nos. 7,629,163; 7,326,681; and 7,029,872). Merely by way of example, recombinant yeast cultures can be grown in Fernbach Flasks or 15 L, 50 L, 100 L, and 200 L fermentors, among others. In cases where plant expression vectors are used, the expression of sequences encoding polypeptides may be driven by any of a number of promoters. For example, viral promoters such as the 35S and 19S promoters of CaMV may be used alone or in combination with the omega leader sequence from TMV (Takamatsu, EMBO J. 6:307-311 (1987)). Alternatively, plant promoters such as the small subunit of RUBISCO or heat shock promoters may be used (Coruzzi et al., EMBO J. 3:1671-1680 (1984); Broglie et al., Science 224:838-843 (1984); and Winter et al., Results Probl. Cell Differ. 17:85-105 (1991)). These constructs can be introduced into plant cells by direct DNA transformation or pathogen-mediated transfection. Such techniques are described in a number of generally available reviews (see, e.g., Hobbs in McGraw Hill, Yearbook of Science and Technology, pp. 191-196 (1992)).

[0274] An insect system may also be used to express a polypeptide of interest. For example, in one such system, Autographa californica nuclear polyhedrosis virus (AcNPV) is used as a vector to express foreign genes in Spodoptera frugiperda cells or in Trichoplusia cells. The sequences encoding the polypeptide may be cloned into a non-essential region of the virus, such as the polyhedrin gene, and placed under control of the polyhedrin promoter. Successful insertion of the polypeptide-encoding sequence will render the polyhedrin gene inactive and produce recombinant virus lacking coat protein. The recombinant viruses may then be used to infect, for example, S. frugiperda cells or Trichoplusia cells in which the polypeptide of interest may be expressed (Engelhard et al., Proc. Natl. Acad. Sci. U.S.A. 91:3224-3227 (1994)). Also included are baculovirus expression systems, including those that utilize SF9, SF21, and T. ni cells (see, e.g., Murphy and Piwnica-Worms, Curr Protoc Protein Sci. Chapter 5:Unit5.4, 2001). Insect systems can provide post-translation modifications that are similar to mammalian systems.

[0275] In mammalian host cells, a number of viral-based expression systems are generally available. For example, in cases where an adenovirus is used as an expression vector, sequences encoding a polypeptide of interest may be ligated into an adenovirus transcription/translation complex consisting of the late promoter and tripartite leader sequence. Insertion in a non-essential E1 or E3 region of the viral genome may be used to obtain a viable virus which is capable of expressing the polypeptide in infected host cells (Logan & Shenk, Proc. Natl. Acad. Sci. U.S.A. 81:3655-3659 (1984)). In addition, transcription enhancers, such as the Rous sarcoma virus (RSV) enhancer, may be used to increase expression in mammalian host cells.

[0276] Examples of useful mammalian host cell lines include monkey kidney CV1 line transformed by SV40 (COS-7, ATCC CRL 1651); human embryonic kidney line (293 or 293 cells sub-cloned for growth in suspension culture, Graham et al., J. Gen Virol. 36:59 (1977)); baby hamster kidney cells (BHK, ATCC CCL 10); mouse sertoli cells (TM4, Mather, Biol. Reprod. 23:243-251 (1980)); monkey kidney cells (CV1 ATCC CCL 70); African green monkey kidney cells (VERO-76, ATCC CRL-1587); human cervical carcinoma cells (HELA, ATCC CCL 2); canine kidney cells (MDCK, ATCC CCL 34); buffalo rat liver cells (BRL 3A, ATCC CRL 1442); human lung cells (W138, ATCC CCL 75); human liver cells (Hep G2, HB 8065); mouse mammary tumor (MMT 060562, ATCC CCL 51); TR1 cells (Mather et al., Annals N.Y. Acad. Sci. 383:44-68 (1982)); MRC 5 cells; FS4 cells; and a human hepatoma line (Hep G2). Other useful mammalian host cell lines include Chinese hamster ovary (CHO) cells, including DHFR-CHO cells (Urlaub et al., PNAS USA 77:4216 (1980)); and myeloma cell lines such as NSO and Sp2/0. For a review of certain mammalian host cell lines suitable for protein production, see, e.g., Yazaki and Wu, Methods in Molecular Biology, Vol. 248 (B. K.C Lo, ed., Humana Press, Totowa, N.J., 2003), pp. 255-268. Certain preferred mammalian cell expression systems include CHO and HEK293-cell based expression systems Mammalian expression systems can utilize attached cell lines, for example, in T-flasks, roller bottles, or cell factories, or suspension cultures, for example, in 1 L and 5 L spinners, 5 L, 14 L, 40 L, 100 L and 200 L stir tank bioreactors, or 20/50 L and 100/200 L WAVE bioreactors, among others known in the art.

[0277] Also included is the cell-free expression of proteins. These and related embodiments typically utilize purified RNA polymerase, ribosomes, tRNA and ribonucleotides; these reagents may be produced by extraction from cells or from a cell-based expression system.

[0278] Specific initiation signals may also be used to achieve more efficient translation of sequences encoding a polypeptide of interest. Such signals include the ATG initiation codon and adjacent sequences. In cases where sequences encoding the polypeptide, its initiation codon, and upstream sequences are inserted into the appropriate expression vector, no additional transcriptional or translational control signals may be needed. However, in cases where only coding sequence, or a portion thereof, is inserted, exogenous translational control signals including the ATG initiation codon should be provided. Furthermore, the initiation codon should be in the correct reading frame to ensure translation of the entire insert. Exogenous translational elements and initiation codons may be of various origins, both natural and synthetic. The efficiency of expression may be enhanced by the inclusion of enhancers which are appropriate for the particular cell system which is used, such as those described in the literature (Scharf. et al., Results Probl. Cell Differ. 20:125-162 (1994)).

[0279] In addition, a host cell strain may be chosen for its ability to modulate the expression of the inserted sequences or to process the expressed protein in the desired fashion. Such modifications of the polypeptide include, but are not limited to, post-translational modifications such as acetylation, carboxylation, glycosylation, phosphorylation, lipidation, and acylation. Post-translational processing which cleaves a “prepro” form of the protein may also be used to facilitate correct insertion, folding and/or function. Different host cells such as yeast, CHO, HeLa, MDCK, HEK293, and W138, in addition to bacterial cells, which have or even lack specific cellular machinery and characteristic mechanisms for such post-translational activities, may be chosen to ensure the correct modification and processing of the foreign protein.

[0280] For long-term, high-yield production of recombinant proteins, stable expression is generally preferred. For example, cell lines which stably express a polynucleotide of interest may be transformed using expression vectors which may contain viral origins of replication and/or endogenous expression elements and a selectable marker gene on the same or on a separate vector. Following the introduction of the vector, cells may be allowed to grow for about 1-2 days in an enriched media before they are switched to selective media. The purpose of the selectable marker is to confer resistance to selection, and its presence allows growth and recovery of cells which successfully express the introduced sequences. Resistant clones of stably transformed cells may be proliferated using tissue culture techniques appropriate to the cell type. Transient production, such as by transient transfection or infection, can also be employed. Exemplary mammalian expression systems that are suitable for transient production include HEK293 and CHO-based systems.

[0281] Any number of selection systems may be used to recover transformed or transduced cell lines. These include, but are not limited to, the herpes simplex virus thymidine kinase (Wigler et al., Cell 11:223-232 (1977)) and adenine phosphoribosyltransferase (Lowy et al., Cell 22:817-823 (1990)) genes which can be employed in tk- or aprt- cells, respectively. Also, antimetabolite, antibiotic or herbicide resistance can be used as the basis for selection; for example, dhfr which confers resistance to methotrexate (Wigler et al., Proc. Natl. Acad. Sci. U.S.A. 77:3567-70 (1980)); npt, which confers resistance to the aminoglycosides, neomycin and G-418 (Colbere-Garapin et al., J. Mol. Biol. 150:1-14 (1981)); and als or pat, which confer resistance to chlorsulfuron and phosphinotricin acetyltransferase, respectively (Murry, supra). Additional selectable genes have been described, for example, trpB, which allows cells to utilize indole in place of tryptophan, or hisD, which allows cells to utilize histinol in place of histidine (Hartman & Mulligan, Proc. Natl. Acad. Sci. U.S.A. 85:8047-51 (1988)). The use of visible markers has gained popularity with such markers as green fluorescent protein (GFP) and other fluorescent proteins (e.g., RFP, YFP), anthocyanins, β-glucuronidase and its substrate GUS, and luciferase and its substrate luciferin, being widely used not only to identify transformants, but also to quantify the amount of transient or stable protein expression attributable to a specific vector system (see, e.g., Rhodes et al., Methods Mol. Biol. 55:121-131 (1995)).

[0282] Also included are high-throughput protein production systems, or micro-production systems. Certain aspects may utilize, for example, hexa-histidine fusion tags for protein expression and purification on metal chelate-modified slide surfaces or MagneHis Ni-Particles (see, e.g., Kwon et al., BMC Biotechnol. 9:72, 2009; and Lin et al., Methods Mol Biol. 498:129-41, 2009)). Also included are high-throughput cell-free protein expression systems (see, e.g., Sitaraman et al., Methods Mol Biol. 498:229-44, 2009).

[0283] A variety of protocols for detecting and measuring the expression of polynucleotide-encoded products, using binding agents or antibodies such as polyclonal or monoclonal antibodies specific for the product, are known in the art. Examples include enzyme-linked immunosorbent assay (ELISA), western immunoblots, radioimmunoassays (RIA), and fluorescence activated cell sorting (FACS). These and other assays are described, among other places, in Hampton et al., Serological Methods, a Laboratory Manual (1990) and Maddox et al., J. Exp. Med. 158:1211-1216 (1983).

[0284] A wide variety of labels and conjugation techniques are known by those skilled in the art and may be used in various nucleic acid and amino acid assays. Means for producing labeled hybridization or PCR probes for detecting sequences related to polynucleotides include oligolabeling, nick translation, end-labeling or PCR amplification using a labeled nucleotide. Alternatively, the sequences, or any portions thereof may be cloned into a vector for the production of an mRNA probe. Such vectors are known in the art, are commercially available, and may be used to synthesize RNA probes in vitro by addition of an appropriate RNA polymerase such as T7, T3, or SP6 and labeled nucleotides. These procedures may be conducted using a variety of commercially available kits. Suitable reporter molecules or labels, which may be used include radionuclides, enzymes, fluorescent, chemiluminescent, or chromogenic agents as well as substrates, cofactors, inhibitors, magnetic particles, and the like.

[0285] Host cells transformed with one or more polynucleotide sequences of interest may be cultured under conditions suitable for the expression and recovery of the protein from cell culture. Certain specific embodiments utilize serum free cell expression systems. Examples include HEK293 cells and CHO cells that can grown on serum free medium (see, e.g., Rosser et al., Protein Expr. Purif. 40:237-43, 2005; and U.S. Pat. No. 6,210,922).

[0286] An activatable proprotein produced by a recombinant cell may be secreted or contained intracellularly depending on the sequence and/or the vector used. As will be understood by those of skill in the art, expression vectors containing polynucleotides may be designed to contain signal sequences which direct secretion of the encoded polypeptide through a prokaryotic or eukaryotic cell membrane. Other recombinant constructions may be used to join sequences encoding a polypeptide of interest to nucleotide sequence encoding a polypeptide domain which will facilitate purification and/or detection of soluble proteins. Examples of such domains include cleavable and non-cleavable affinity purification and epitope tags such as avidin, FLAG tags, poly-histidine tags (e.g., 6× His), cMyc tags, VS-tags, glutathione S-transferase (GST) tags, and others.

[0287] The protein produced by a recombinant cell can be purified and characterized according to a variety of techniques known in the art. Exemplary systems for performing protein purification and analyzing protein purity include fast protein liquid chromatography (FPLC) (e.g., AKTA and Bio-Rad FPLC systems), high-pressure liquid chromatography (HPLC) (e.g., Beckman and Waters HPLC). Exemplary chemistries for purification include ion exchange chromatography (e.g., Q, S), size exclusion chromatography, salt gradients, affinity purification (e.g., Ni, Co, FLAG, maltose, glutathione, protein A/G), gel filtration, reverse-phase, ceramic HYPERD® ion exchange chromatography, and hydrophobic interaction columns (HIC), among others known in the art. Also included are analytical methods such as SDS-PAGE (e.g., Coomassie, silver stain), immunoblot, Bradford, and ELISA, which may be utilized during any step of the production or purification process, typically to measure the purity of the protein composition.

[0288] Also included are methods of concentrating activatable proproteins, and composition comprising concentrated soluble activatable proproteins. In some aspects, such concentrated solutions of at least one activatable proprotein comprise proteins at a concentration of about or at least about 5 mg/mL, 8 mg/mL, 10 mg/mL, 15 mg/mL, 20 mg/mL, or more.

[0289] In some aspects, such compositions may be substantially monodisperse, meaning that an activatable proprotein exists primarily (i.e., at least about 90%, or greater) in one apparent molecular weight form when assessed for example, by size exclusion chromatography, dynamic light scattering, or analytical ultracentrifugation.

[0290] In some aspects, such compositions have a purity (on a protein basis) of at least about 90%, or in some aspects at least about 95% purity, or in some embodiments, at least 98% purity. Purity may be determined via any routine analytical method as known in the art.

[0291] In some aspects, such compositions have a high molecular weight aggregate content of less than about 10%, compared to the total amount of protein present, or in some embodiments such compositions have a high molecular weight aggregate content of less than about 5%, or in some aspects such compositions have a high molecular weight aggregate content of less than about 3%, or in some embodiments a high molecular weight aggregate content of less than about 1%. High molecular weight aggregate content may be determined via a variety of analytical techniques including for example, by size exclusion chromatography, dynamic light scattering, or analytical ultracentrifugation.

[0292] Examples of concentration approaches contemplated herein include lyophilization, which is typically employed when the solution contains few soluble components other than the protein of interest. Lyophilization is often performed after HPLC run, and can remove most or all volatile components from the mixture. Also included are ultrafiltration techniques, which typically employ one or more selective permeable membranes to concentrate a protein solution. The membrane allows water and small molecules to pass through and retains the protein; the solution can be forced against the membrane by mechanical pump, gas pressure, or centrifugation, among other techniques.

[0293] In certain embodiments, an activatable proprotein in a composition has a purity of at least about 90%, as measured according to routine techniques in the art. In certain embodiments, such as diagnostic compositions or certain pharmaceutical or therapeutic compositions, an activatable proprotein composition has a purity of at least about 95%, or at least about 97% or 98% or 99%. In some embodiments, such as when being used as reference or research reagents, activatable proproteins can be of lesser purity, and may have a purity of at least about 50%, 60%, 70%, or 80%. Purity can be measured overall or in relation to selected components, such as other proteins, e.g., purity on a protein basis.

[0294] Purified activatable proproteins can also be characterized according to their biological characteristics. Binding affinity and binding kinetics can be measured according to a variety of techniques known in the art, such as Biacore® and related technologies that utilize surface plasmon resonance (SPR), an optical phenomenon that enables detection of unlabeled interactants in real time. SPR-based biosensors can be used in determination of active concentration, screening and characterization in terms of both affinity and kinetics. The presence or levels of one or more biological activities can be measured according to cell-based assays, including those that utilize at least one IL-2 receptor, which is optionally functionally coupled to a readout or indicator, such as a fluorescent or luminescent indicator of biological activity, as described herein.

[0295] In certain embodiments, as noted above, an activatable proprotein composition is substantially endotoxin free, including, for example, about 95% endotoxin free, preferably about 99% endotoxin free, and more preferably about 99.99% endotoxin free. The presence of endotoxins can be detected according to routine techniques in the art, as described herein. In specific embodiments, an activatable proprotein composition is made from a eukaryotic cell such as a mammalian or human cell in substantially serum free media. In certain embodiments, as noted herein, an activatable proprotein composition has an endotoxin content of less than about 10 EU/mg of activatable proprotein, or less than about 5 EU/mg of activatable proprotein, less than about 3 EU/mg of activatable proprotein, or less than about 1 EU/mg of activatable proprotein.

[0296] In certain embodiments, an activatable proprotein composition comprises less than about 10% wt/wt high molecular weight aggregates, or less than about 5% wt/wt high molecular weight aggregates, or less than about 2% wt/wt high molecular weight aggregates, or less than about or less than about 1% wt/wt high molecular weight aggregates.

[0297] Also included are protein-based analytical assays and methods, which can be used to assess, for example, protein purity, size, solubility, and degree of aggregation, among other characteristics. Protein purity can be assessed a number of ways. For instance, purity can be assessed based on primary structure, higher order structure, size, charge, hydrophobicity, and glycosylation. Examples of methods for assessing primary structure include N- and C-terminal sequencing and peptide-mapping (see, e.g., Allen et al., Biologicals. 24:255-275, 1996)). Examples of methods for assessing higher order structure include circular dichroism (see, e.g., Kelly et al., Biochim Biophys Acta. 1751:119-139, 2005), fluorescent spectroscopy (see, e.g., Meagher et al., J. Biol. Chem. 273:23283-89, 1998), FT-IR, amide hydrogen-deuterium exchange kinetics, differential scanning calorimetry, NMR spectroscopy, immunoreactivity with conformationally sensitive antibodies. Higher order structure can also be assessed as a function of a variety of parameters such as pH, temperature, or added salts. Examples of methods for assessing protein characteristics such as size include analytical ultracentrifugation and size exclusion HPLC (SEC-HPLC), and exemplary methods for measuring charge include ion-exchange chromatography and isolectric focusing. Hydrophobicity can be assessed, for example, by reverse-phase HPLC and hydrophobic interaction chromatography HPLC. Glycosylation can affect pharmacokinetics (e.g., clearance), conformation or stability, receptor binding, and protein function, and can be assessed, for example, by mass spectrometry and nuclear magnetic resonance (NMR) spectroscopy.

[0298] As noted above, certain embodiments include the use of SEC-HPLC to assess protein characteristics such as purity, size (e.g., size homogeneity) or degree of aggregation, and/or to purify proteins, among other uses. SEC, also including gel-filtration chromatography (GFC) and gel-permeation chromatography (GPC), refers to a chromatographic method in which molecules in solution are separated in a porous material based on their size, or more specifically their hydrodynamic volume, diffusion coefficient, and/or surface properties. The process is generally used to separate biological molecules, and to determine molecular weights and molecular weight distributions of polymers. Typically, a biological or protein sample (such as a protein extract produced according to the protein expression methods provided herein and known in the art) is loaded into a selected size-exclusion column with a defined stationary phase (the porous material), preferably a phase that does not interact with the proteins in the sample. In certain aspects, the stationary phase is composed of inert particles packed into a dense three-dimensional matrix within a glass or steel column. The mobile phase can be pure water, an aqueous buffer, an organic solvent, or a mixture thereof. The stationary-phase particles typically have small pores and/or channels which only allow molecules below a certain size to enter. Large particles are therefore excluded from these pores and channels, and their limited interaction with the stationary phase leads them to elute as a “totally-excluded” peak at the beginning of the experiment Smaller molecules, which can fit into the pores, are removed from the flowing mobile phase, and the time they spend immobilized in the stationary-phase pores depends, in part, on how far into the pores they penetrate. Their removal from the mobile phase flow causes them to take longer to elute from the column and results in a separation between the particles based on differences in their size. A given size exclusion column has a range of molecular weights that can be separated. Overall, molecules larger than the upper limit will not be trapped by the stationary phase, molecules smaller than the lower limit will completely enter the solid phase and elute as a single band, and molecules within the range will elute at different rates, defined by their properties such as hydrodynamic volume. For examples of these methods in practice with pharmaceutical proteins, see Bruner et al., Journal of Pharmaceutical and Biomedical Analysis. 15: 1929-1935, 1997.

[0299] Protein purity for clinical applications is also discussed, for example, by Anicetti et al. (Trends in Biotechnology. 7:342-349, 1989). More recent techniques for analyzing protein purity include, without limitation, the LabChip GXII, an automated platform for rapid analysis of proteins and nucleic acids, which provides high throughput analysis of titer, sizing, and purity analysis of proteins. In certain non-limiting embodiments, clinical grade activatable proproteins can be obtained by utilizing a combination of chromatographic materials in at least two orthogonal steps, among other methods (see, e.g., Therapeutic Proteins: Methods and Protocols. Vol. 308, Eds., Smales and James, Humana Press Inc., 2005). Typically, protein agents (e.g., activatable proprotein) are substantially endotoxin-free, as measured according to techniques known in the art and described herein.

[0300] Protein solubility assays are also included. Such assays can be utilized, for example, to determine optimal growth and purification conditions for recombinant production, to optimize the choice of buffer(s), and to optimize the choice of activatable proproteins and variants thereof. Solubility or aggregation can be evaluated according to a variety of parameters, including temperature, pH, salts, and the presence or absence of other additives. Examples of solubility screening assays include, without limitation, microplate-based methods of measuring protein solubility using turbidity or other measure as an end point, high-throughput assays for analysis of the solubility of purified recombinant proteins (see, e.g., Stenvall et al., Biochim Biophys Acta. 1752:6-10, 2005), assays that use structural complementation of a genetic marker protein to monitor and measure protein folding and solubility in vivo (see, e.g., Wigley et al., Nature Biotechnology. 19:131-136, 2001), and electrochemical screening of recombinant protein solubility in Escherichia coli using scanning electrochemical microscopy (SECM) (see, e.g., Nagamine et al., Biotechnology and Bioengineering. 96:1008-1013, 2006), among others. Activatable proprotein with increased solubility (or reduced aggregation) can be identified or selected for according to routine techniques in the art, including simple in vivo assays for protein solubility (see, e.g., Maxwell et al., Protein Sci. 8:1908-11, 1999).

[0301] Protein solubility and aggregation can also be measured by dynamic light scattering techniques. Aggregation is a general term that encompasses several types of interactions or characteristics, including soluble/insoluble, covalent/noncovalent, reversible/irreversible, and native/denatured interactions and characteristics. For protein therapeutics, the presence of aggregates is typically considered undesirable because of the concern that aggregates may cause an immunogenic reaction (e.g., small aggregates), or may cause adverse events on administration (e.g., particulates). Dynamic light scattering refers to a technique that can be used to determine the size distribution profile of small particles in suspension or polymers such as proteins in solution. This technique, also referred to as photon correlation spectroscopy (PCS) or quasi-elastic light scattering (QELS), uses scattered light to measure the rate of diffusion of the protein particles. Fluctuations of the scattering intensity can be observed due to the Brownian motion of the molecules and particles in solution. This motion data can be conventionally processed to derive a size distribution for the sample, wherein the size is given by the Stokes radius or hydrodynamic radius of the protein particle. The hydrodynamic size depends on both mass and shape (conformation). Dynamic scattering can detect the presence of very small amounts of aggregated protein (<0.01% by weight), even in samples that contain a large range of masses. It can also be used to compare the stability of different formulations, including, for example, applications that rely on real-time monitoring of changes at elevated temperatures. Accordingly, certain embodiments include the use of dynamic light scattering to analyze the solubility and/or presence of aggregates in a sample that contains an activatable proprotein of the present disclosure.

[0302] Although the foregoing embodiments have been described in some detail by way of illustration and example for purposes of clarity of understanding, it will be readily apparent to one of ordinary skill in the art in light of the teachings of this disclosure that certain changes and modifications may be made thereto without departing from the spirit or scope of the appended claims. The following examples are provided by way of illustration only and not by way of limitation. Those of skill in the art will readily recognize a variety of noncritical parameters that could be changed or modified to yield essentially similar results.

### EXAMPLES

### Example 1

### ENGINEERING OF “IL-2-LINKER-IL-2RA” AND “IL-2RA-LINKER-IL-2” ACTIVATABLE PROPROTEINS

[0303] In order to reduce the toxicity of IL-2 related therapeutic drugs, IL-2-linker-IL-2Rα (hereon referred to as ILR fusion proteins) and IL-2Rα-linker-IL-2 fusion proteins (hereon referred to as RLI fusion proteins) were generated as prodrugs, or activatable proproteins. The prodrugs have very low activity in their activatable form. Full or nearly full activities can be restored upon protease cleavage of the designed protease specific linker sequence within the prodrugs (see, for example, FIGS. 4A-4E).

[0304] Human IL-2-T3 with triple mutation of V69A, Q74P, and I128T, which has higher binding affinity towards IL-2Rα, was used in the exemplary fusion proteins. In order to restore the activity of IL-2, the TEV protease cleavage site was used to provide proof of concept.

[0305] Plasmids coding for single chain IL-2-linker-IL-2Rα (ILR) and IL-2Rα-linker-IL-2 (RLI) with or without Fc fusion were constructed by standard gene synthesis, followed by sub-cloning into pTT5 expression vector. Schematics of illustrative ILR fusion protein formats are depicted in FIGS. 2A, 2B, 2D, 2E, 2G, and 2H. Schematics of illustrative RLI fusion protein formats are depicted in FIGS. 3A, 3B, 3D, 3E, 3G, and 3H.

[0306] Illustrative proteins of IL-2-stable linker-IL-2Rα format (FIG. 2A) with C-terminal His-tag include P1522 and P1525. Illustrative proteins of IL-2-TEV-IL-2Rα format (FIG. 2B) with C-terminal His-tag include P1630, P1664, and P1667. Illustrative proteins of Fc-TEV-IL-2-stable linker-IL-2Rα format (FIG. 2D) include P1523 and P1526. Illustrative proteins of Fc-stable liner-IL-2-TEV-IL-2Rα format (FIG. 2E) include P1631, P1665, and P1668. Illustrative proteins of IL-2-stable linker-IL-2Rα-TEV-Fc format (FIG. 2G) include P1524 and P1527. Illustrative proteins of IL-2-TEV-IL-2Rα-stable linker-Fc format (FIG. 2H) include P1632, P1666, and P1669.

[0307] Illustrative proteins of IL-2Rα-stable linker-IL-2 format (FIG. 3A) with C-terminal His-tag include P1528 and P1531. Illustrative proteins of IL-2Rα-TEV-IL-2 format (FIG. 3B) with C-terminal His-tag include P1633, P1773, and P1776. Illustrative proteins of Fc-TEV-IL-2Rα-stable linker-IL-2 format (FIG. 3D) include P1529 and P1532. Illustrative proteins of Fc-stable liner-IL-2Rα-TEV-IL-2 format (FIG. 3E) include P1634, P1774, and P1777. Illustrative proteins of IL-2Rα-stable linker-IL-2-TEV-Fc format (FIG. 3G) include P1530 and P1533. Illustrative proteins of IL-2Rα-TEV-IL-2-stable linker-Fc format (FIG. 3H) include P1635, P1775, and P1778.

[0308] In P1522, P1523, P1524, P1528, P1529, and P1530, the linker length is 5 amino acid between IL-2 and IL-2Rα. In P1525, P1526, P1527, P1531, P1532, and P1533, the linker length is 10 amino acid between IL-2 and IL-2Rα. In P1630, P1631, P1632, P1633, P1634, and P1635, the linker length is 11 amino acid between IL-2 and IL-2Rα. In P1664, P1665, P1666, P1773, P1774, and P1775, the linker length is 15 amino acid between IL-2 and IL-2Rα. In P1667, P1668, P1669, P1776, P1777, and P1778, the linker length is 19 amino acid between IL-2 and IL-2Rα.

[0309] For ILR format, real protease cleavage sites (PSs) were introduced into the linker between IL-2 and IL-2Rα. Potential O-glycosylation site in IL-2 was substituted with alanine (T3A). Disulfide bond was introduced between IL-2 and IL-2Rα by introducing E61C into IL-2 and K38C into IL-2Rα. Illustrative proteins include P1719 (IL-2-PS-IL-2Rα-His6), P1720 (Fc-stable linker-IL-2-PS-IL-2Rα), P1721 (IL-2-PS-IL-2Rα-stable linker-Fc), P1722 (IL-2-PS-IL-2Rα-His6), P1723 (Fc-stable linker-IL-2-PS-IL-2Rα), and P1724 (IL-2-PS-IL-2Rα-stable linker-Fc).

[0310] For Fc-stable linker-IL-2Rα-PS-IL-2 format, real protease cleavage sites (PSs) were introduced into the linker between IL-2Rα and IL-2. A potential O-glycosylation site in IL-2 was substituted with alanine (T3A). A disulfide bond was introduced between IL-2 and IL-2Rα. At least one cysteine mutation was introduced in IL-2 at K35, R38, or E61, and in IL-2Rα at D04, H120, K38, or S39. Illustrative proteins include P1725, P1726, P1727, P1728, P1729 and P1730.

[0311] For activatable proprotein design, real protease cleavage sites (PSs) were introduced into the linker between IL-2 and IL-2Rα for IL-2-PS-IL-2Rα-stable linker-Fc format. A potential O-glycosylation site in IL-2 was substituted with alanine (T3A). Plasmids coding for IL-2-PSs-IL-2Rα-stable linker-Fc were constructed by standard gene synthesis and sub-cloned into pTT5 expression vector with linker flanking protease cleavage sites. Illustrative proteins include P1779, P1780, P1781, P1782, P1783, P1784, and P1785. P1786 was generated as a control protein without a cleavage site between IL-2 and IL-2Rα.

[0312] For activatable proprotein design, different real protease cleavage sites (PSs) were introduced into the linker between Fc/IL-2 and IL-2/IL-2Rα, respectively. A potential O-glycosylation site in IL-2 was substituted with alanine (T3A). Potential N-glycosylation sites in IL-2R were substituted with alanine (N49A and N68A) in one construct. IL-2-D10 was also tested in one construct. Plasmids coding for Fc-PS1-IL-2-PS2-IL2Rα were constructed by standard gene synthesis and sub-cloned into pTT5 expression vector with linker flanking protease cleavage sites. Illustrative proteins include P1834, P1835, P1836, P1837, P1838, P1839, P1840, P1841, P1842, P1843, P1844, P1845, P1846, P1847, P1848, P1849, and P1850.

[0313] Wild type IL-2 and IL-2 muteins with lower binding affinity towards IL-2Rα were also tested in the Fc-stable linker-IL-2-TEV-IL-2Rα format. A potential O-glycosylation site was substituted with alanine (T3A). IL-2 muteins tested include IL-2-F42A, IL-2-Y45A, and IL-2-F42A-Y45A. Illustrative proteins include P1946, P1947, P1948, and P1949. The IL-2-E61S/IL-2Rα-K38S combination was also tested. An illustrative protein includes P1972.

[0314] ILR format was also tested in antibody fusion format. ILR was fused to the C-terminal of an antibody heavy chain with a protease cleavage site between the heavy chain and IL-2, or between IL-2 and IL-2Rα. A potential O-glycosylation site in IL-2 was substituted with alanine (T3A), and the C-terminal lysine (K) on the heavy chain was deleted. The cysteine 217 on heavy chain was substituted with serine since IgG4-Fd was used. Illustrative proteins include P14501950, P14501951, P14501952, and P14501953.

[0315] Production, purification and characterization. Fc fusion proteins were produced by transient transfection in Expi293 cells and purified by a two-step purification process comprising Mab Select SuRe chromatography (GE Healthcare) and size exclusion chromatography (Superdex 200, GE Healthcare). His-tagged proteins were produced by transient transfection in Expi293 cells and purified by a two-step purification process comprising nickel affinity chromatography (GE Healthcare) and size exclusion chromatography (Superdex 200, GE Healthcare).

[0316] Purified proteins were characterized by SDS-PAGE for purity assessment and showed good purity as shown, for example, in FIGS. 6A, 6B, 10A, 10B, 13A, 13B, 16A, 16B, 19A, 19B, 22A, 22B, 25A, 25B, 27A, and 27B.

[0317] Protease cleavage was performed for purified proteins with the corresponding cleavage site. The proteases tested were as follows: TEV, uPA(R&D, Cat #1310-SE-010), matriptase (R&D, Cat #3946-SEB-010) and MMP-2 (R&D, Cat #902-MP-010). P1529, P1532, P1630, P1631, and P1632 could not be cleaved by TEV and the other proteins could be cleaved by TEV as shown in FIG. 6C. P1664, P1665, P1666, P1667, P1668, and P1669 could be cleaved by TEV as shown in FIG. 10C. P1719, P1721, P1722, P1723, P1724, P1725, and P1726 could be cleaved by uPA protease partially as shown in FIG. 13C. P1773, P1774, P1775, P1776, P1777, and P1778 could be cleaved by TEV, and P1779, P1780, P1781, P1782, P1783, P1784, and P1785 could be cleaved by uPA protease, as shown in FIG. 16C.

[0318] As shown in FIG. 19C, the purified proteins could be cleaved by uPA, matriptase, or MMP-2 partially or completely. As shown in FIG. 19D, P1842 and P1847 could be cleaved by uPA and MMP-2 at the same time. P1946, P1947, P1948, and P1949 could be cleaved by TEV partially as shown in FIG. 22C. P14501950, P14501951, P14501952, and P14501953 could be cleaved by MMP-2, uPA, or matriptase completely or partially as shown in FIG. 25C. P1972 could be cleaved by TEV partially as shown in FIG. 27C.

[0319] Purified proteins were also characterized by high performance liquid chromatography (HPLC) for homogeneity assessment. HPLC analysis was performed using Nanofilm SEC-250 column (Sepax) and Agilent 1260 according to the manufacturer's instructions. Representative HPLC results are shown in FIGS. 7A-7J, 11A-11F, 14A-14D, 17A-17D, 20A-20D, 23A-23D, 26A-26D, and 27D. Most of the proteins showed one single peak, indicating good homogeneity.

[0320] Functional assays—Proliferation. Proliferation assays were performed for purified proteins before and after cleavage. M-07e (IL-2Rβ/γc) cells were cultured in RPMI 1640 supplemented with 20% fetal bovine serum (FBS), 1% non-essential amino acids (NEAA), and 10% of 5637 cell culture supernatant. To measure cytokine-dependent cell proliferation, Mole cells were harvested in their logarithmic growth phase and washed twice with PBS. 90 μl of cell suspension (2×10⁴ cells/well) was seeded into 96-well plate and incubated for 4 hours in assay medium (RPMI 1640 supplemented with 10% FBS and 1% NEAA) for cytokine starvation at 37° C. and 5% CO2. IL-2 control and purified proteins samples used in the assays were prepared in assay medium to an initial concentration of 300 nM, followed by 1/3 serial dilutions. 10 μl of diluted protein was added into corresponding wells and incubated at 37° C. and 5% CO2 for 72 hours. Colorimetric assays using a Cell Counting Kit-8 (CCK-8, Dojindo, CK04) were performed to measure the amount of live cells. The results are shown in FIGS. 8A-8L, 9A-9E, 12A-12F, 15A-15E, 18A-18N, 21A-21Q, 24A-24D, and 28.

[0321] No activity was detected for fusion proteins without TEV cleavage site from IL-2-stable linker-IL-2Rα format (P1522 and P1525) and IL-2Rα-stable linker-IL-2 format (P1528 and P1531). No activity was detected for fusion proteins before TEV cleavage from Fc-TEV-IL-2-stable linker-IL-2Rα format (P1523 and P1526), IL-2-stable linker-IL-2Rα-TEV-Fc format (P1524 and P1527), Fc-TEV-IL-2Rα-stable linker-IL-2 format (P1529 and P1532) and IL-2Rα-stable linker-IL-2-TEV-Fc format (P1530 and P1533). IL-2 activity was not restored for these fusion proteins after TEV cleavage.

[0322] For the formats with TEV cleavage site between IL-2 and IL-2Rα, P1630, P1631, and P1632 showed no activity before TEV cleavage and could not be cleaved by TEV; P1635 showed no activity before and after TEV cleavage; P1633 and P1634 showed low activity before TEV cleavage and restored full or partial activity after TEV cleavage.

[0323] For the fusion proteins with longer cleavable linker (TEV cleavage site) between IL-2 and IL-2Rα, P1664, P1665, P1666, P1667, P1668, P1669, P1773, P1774, P1776, and P1777 showed very low activity before TEV cleavage and restored full or partial activity after TEV cleavage. P1775 and P1778 showed no or very low activity before TEV cleavage and activity could not be recovered after TEV cleavage.

[0324] For the fusion proteins with real protease cleavage site in the linker between IL-2 and IL-2Rα, P1779, P1780, P1781, P1782, P1783, and P1785 showed no or very low activity before protease cleavage and activity was recovered after protease cleavage. P1786, as a negative control, showed no activity before and after protease cleavage.

[0325] For ILR format with disulfide bond between IL-2 and IL-2Rα, P1719 P1721, P1722, P1723, and P1724 showed no or low activity before protease cleavage and activity was recovered partially or fully after protease cleavage.

[0326] For Fc-PS1-IL-2-PS2-IL2Rα format, fusion proteins showed no or very low activity before protease cleavage, and activity was recovered partially after protease cleavage at PS2, as shown in FIGS. 21A-21O. For P1842 and P1847, different cleavage combinations were tested: single cleavage at PS1, single cleavage at PS2, and double cleavage at both PS1 and PS2. For P1842, low activity was recovered after single cleavage at PS1 or PS2, and full activity was restored after double cleavage at both PS1 and PS2. For P1847 with superkine D10, low activity was detected before protease cleavage and full activity was recovered after single cleavage at PS1 or PS2, and after double cleavage at both PS1 and PS2; indeed, after double cleavable this construct showed higher activity than wild-type IL-2.

[0327] For the fusion proteins with wild type IL-2 or IL-2 muteins with lower binding affinity towards IL-2Rα, P1946, P1947, P1948, and P1949 showed low activity before protease cleavage and restored full activity after cleavage. P1947, P1948, and P1949 with IL-2 muteins showed higher activity than P1946 before protease cleavage.

[0328] P1972, with IL-2-E61S and IL-2Rα-K38S, showed low activity before TEV cleavage and recovered full activity after cleavage.

The application's sequence listing, which the Patent Office published only in electronic form, follows.

SEQUENCE LISTING (441 sequences)

SEQ ID NO: 1 - protein, 153 aa, Homo sapiens
MYRMQLLSCIALSLALVTNSAPTSSSTKKTQLQLEHLLLDLQMILNGINNYKNPKLTRMLTFKFYMPKKATELKHLQCLEEELKPLEEVLNLAQSKNFHLRPRDLISNINVIVLELKGSETTFMCEYADETATIVEFLNRWITFCQSIISTLT

SEQ ID NO: 2 - protein, 133 aa, Artificial Sequence
  Mature human IL-2 with C125S substitution
APTSSSTKKTQLQLEHLLLDLQMILNGINNYKNPKLTRMLTFKFYMPKKATELKHLQCLEEELKPLEEVLNLAQSKNFHLRPRDLISNINVIVLELKGSETTFMCEYADETATIVEFLNRWITFSQSIISTLT

SEQ ID NO: 3 - protein, 133 aa, Homo sapiens
APTSSSTKKTQLQLEHLLLDLQMILNGINNYKNPKLTRMLTFKFYMPKKATELKHLQCLEEELKPLEEVLNLAHSKNFHFDPRDVVSNINVFVLELKGSETTFMCEYADETATIVEFLNRWITFCQSIISTLT

SEQ ID NO: 4 - protein, 272 aa, Homo sapiens
MDSYLLMWGLLTFIMVPGCQAELCDDDPPEIPHATFKAMAYKEGTMLNCECKRGFRRIKSGSLYMLCTGNSSHSSWDNQCQCTSSATRNTTKQVTPQPEEQKERKTTEMQSPMQPVDQASLPGHCREPPPWENEATERIYHFVVGQMVYYQCVQGYRALHRGPAESVCKMTHGKTRWTQPQLICTGEMETSQFPGEEKPQASPEGRPESETSCLVTTTDFQIQTEMAATMETSIFTTEYQVAVAGCVFLLISVLLLSGLTWQRRQRKSRRTI

SEQ ID NO: 5 - protein, 219 aa, Homo sapiens
ELCDDDPPEIPHATFKAMAYKEGTMLNCECKRGFRRIKSGSLYMLCTGNSSHSSWDNQCQCTSSATRNTTKQVTPQPEEQKERKTTEMQSPMQPVDQASLPGHCREPPPWENEATERIYHFVVGQMVYYQCVQGYRALHRGPAESVCKMTHGKTRWTQPQLICTGEMETSQFPGEEKPQASPEGRPESETSCLVTTTDFQIQTEMAATMETSIFTTEYQ

SEQ ID NO: 6 - protein, 166 aa, Homo sapiens
ELCDDDPPEIPHATFKAMAYKEGTMLNCECKRGFRRIKSGSLYMLCTGNSSHSSWDNQCQCTSSATRNTTKQVTPQPEEQKERKTTEMQSPMQPVDQASLPGHCREPPPWENEATERIYHFVVGQMVYYQCVQGYRALHRGPAESVCKMTHGKTRWTQPQLICTGE

SEQ ID NO: 7 - protein, 133 aa, Artificial Sequence
  Human IL-2 mature form with V69A, Q74P and I128T substitutions
APTSSSTKKTQLQLEHLLLDLQMILNGINNYKNPKLTRMLTFKFYMPKKATELKHLQCLEEELKPLEEALNLAPSKNFHLRPRDLISNINVIVLELKGSETTFMCEYADETATIVEFLNRWITFCQSTISTLT

SEQ ID NO: 8 - protein, 133 aa, Artificial Sequence
  Human IL-2 mature form with F42A, Y45A and L72G substitutions
APTSSSTKKTQLQLEHLLLDLQMILNGINNYKNPKLTRMLTAKFAMPKKATELKHLQCLEEELKPLEEVLNGAQSKNFHLRPRDLISNINVIVLELKGSETTFMCEYADETATIVEFLNRWITFCQSIISTLT

SEQ ID NO: 9 - protein, 133 aa, Artificial Sequence
  Human IL-2 mature form with R38K, F42Q, Y45N, E62L and E68V substitutions
APTSSSTKKTQLQLEHLLLDLQMILNGINNYKNPKLTKMLTQKFNMPKKATELKHLQCLEELLKPLEVVLNLAQSKNFHLRPRDLISNINVIVLELKGSETTFMCEYADETATIVEFLNRWITFCQSIISTLT

SEQ ID NO: 10 - protein, 133 aa, Artificial Sequence
  Human IL-2 mature form with R38K, F42Q, Y45E and E68V substitutions
APTSSSTKKTQLQLEHLLLDLQMILNGINNYKNPKLTKMLTQKFEMPKKATELKHLQCLEEELKPLEVVLNLAQSKNFHLRPRDLISNINVIVLELKGSETTFMCEYADETATIVEFLNRWITFCQSIISTLT

SEQ ID NO: 11 - protein, 133 aa, Artificial Sequence
  Human IL-2 mature form with R38A, F42I, Y45N, E62L and E68V substitutions
APTSSSTKKTQLQLEHLLLDLQMILNGINNYKNPKLTAMLTIKFNMPKKATELKHLQCLEELLKPLEVVLNLAQSKNFHLRPRDLISNINVIVLELKGSETTFMCEYADETATIVEFLNRWITFCQSIISTLT

SEQ ID NO: 12 - protein, 133 aa, Artificial Sequence
  Human IL-2 mature form with R38K, F42K, Y45R, E62L and E68V substitutions
APTSSSTKKTQLQLEHLLLDLQMILNGINNYKNPKLTKMLTKKFRMPKKATELKHLQCLEELLKPLEVVLNLAQSKNFHLRPRDLISNINVIVLELKGSETTFMCEYADETATIVEFLNRWITFCQSIISTLT

SEQ ID NO: 13 - protein, 133 aa, Artificial Sequence
  Human IL-2 mature form with R38K, F42I, Y45E and E68V substitutions
APTSSSTKKTQLQLEHLLLDLQMILNGINNYKNPKLTKMLTIKFEMPKKATELKHLQCLEEELKPLEVVLNLAQSKNFHLRPRDLISNINVIVLELKGSETTFMCEYADETATIVEFLNRWITFCQSIISTLT

SEQ ID NO: 14 - protein, 133 aa, Artificial Sequence
  Human IL-2 mature form with R38A, F42A, Y45A and E62A substitutions
APTSSSTKKTQLQLEHLLLDLQMILNGINNYKNPKLTAMLTAKFAMPKKATELKHLQCLEEALKPLEEVLNLAQSKNFHLRPRDLISNINVIVLELKGSETTFMCEYADETATIVEFLNRWITFCQSIISTLT

SEQ ID NO: 15 - protein, 133 aa, Artificial Sequence
  Human IL-2 mature form with T3A substitution
APASSSTKKTQLQLEHLLLDLQMILNGINNYKNPKLTRMLTFKFYMPKKATELKHLQCLEEELKPLEEVLNLAQSKNFHLRPRDLISNINVIVLELKGSETTFMCEYADETATIVEFLNRWITFCQSIISTLT

SEQ ID NO: 16 - protein, 133 aa, Artificial Sequence
  Human IL-2 mature form with F42A substitution
APTSSSTKKTQLQLEHLLLDLQMILNGINNYKNPKLTRMLTAKFYMPKKATELKHLQCLEEELKPLEEVLNLAQSKNFHLRPRDLISNINVIVLELKGSETTFMCEYADETATIVEFLNRWITFCQSIISTLT

SEQ ID NO: 17 - protein, 133 aa, Artificial Sequence
  Human IL-2 mature form with Y45A susbstitution
APTSSSTKKTQLQLEHLLLDLQMILNGINNYKNPKLTRMLTFKFAMPKKATELKHLQCLEEELKPLEEVLNLAQSKNFHLRPRDLISNINVIVLELKGSETTFMCEYADETATIVEFLNRWITFCQSIISTLT

SEQ ID NO: 18 - protein, 133 aa, Artificial Sequence
  Human IL-2 mature form with F42A and Y45A substitutions
APTSSSTKKTQLQLEHLLLDLQMILNGINNYKNPKLTRMLTAKFAMPKKATELKHLQCLEEELKPLEEVLNLAQSKNFHLRPRDLISNINVIVLELKGSETTFMCEYADETATIVEFLNRWITFCQSIISTLT

SEQ ID NO: 19 - protein, 133 aa, Artificial Sequence
  Human IL-2 mature form with E61S substitution
APTSSSTKKTQLQLEHLLLDLQMILNGINNYKNPKLTRMLTFKFYMPKKATELKHLQCLESELKPLEEVLNLAQSKNFHLRPRDLISNINVIVLELKGSETTFMCEYADETATIVEFLNRWITFCQSIISTLT

SEQ ID NO: 20 - protein, 166 aa, Artificial Sequence
  Human IL-2Ralpha-sushi (22-187) with K38S substitution
ELCDDDPPEIPHATFKAMAYKEGTMLNCECKRGFRRISSGSLYMLCTGNSSHSSWDNQCQCTSSATRNTTKQVTPQPEEQKERKTTEMQSPMQPVDQASLPGHCREPPPWENEATERIYHFVVGQMVYYQCVQGYRALHRGPAESVCKMTHGKTRWTQPQLICTGE

SEQ ID NO: 21 - protein, 12 aa, Artificial Sequence
  Made in Lab - cleavable peptide linker
GSLSGRSDNHGS

SEQ ID NO: 22 - protein, 14 aa, Artificial Sequence
  Made in Lab - cleavable peptide linker
GSLGGSGRSANAGS

SEQ ID NO: 23 - protein, 14 aa, Artificial Sequence
  Made in Lab - cleavable peptide linker
GGSLSGRSANAGGS

SEQ ID NO: 24 - protein, 14 aa, Artificial Sequence
  Made in Lab - cleavable peptide linker
GPLGLAGRSANAGS

SEQ ID NO: 25 - protein, 14 aa, Artificial Sequence
  Made in Lab - cleavable peptide linker
PLGLSGRSANAGPA

SEQ ID NO: 26 - protein, 14 aa, Artificial Sequence
  Made in Lab - cleavable peptide linker
PLGLAGRSANAGPA

SEQ ID NO: 27 - protein, 17 aa, Artificial Sequence
  Made in Lab - cleavable peptide linker
GPLGLSGRSANAGPASG

SEQ ID NO: 28 - protein, 17 aa, Artificial Sequence
  Made in Lab - cleavable peptide linker
GPLGLAGRSANAGPASG

SEQ ID NO: 29 - protein, 17 aa, Artificial Sequence
  Made in Lab - cleavable peptide linker
SGPLGLAGRSANAGPAS

SEQ ID NO: 30 - protein, 17 aa, Artificial Sequence
  Made in Lab - cleavable peptide linker
SGPASGRSANAPLGLAG

SEQ ID NO: 31 - protein, 19 aa, Artificial Sequence
  Made in Lab - cleavable peptide linker
GSGPASGRSANAPLGLAGS

SEQ ID NO: 32 - protein, 17 aa, Artificial Sequence
  Made in Lab - cleavable peptide linker
GPLGLAGRSANPGPASG

SEQ ID NO: 33 - protein, 17 aa, Artificial Sequence
  Made in Lab - cleavable peptide linker
GPLGLAGRSDNHGPASG

SEQ ID NO: 34 - protein, 17 aa, Artificial Sequence
  Made in Lab - cleavable peptide linker
GPLGLAGRSDNPGPASG

SEQ ID NO: 35 - protein, 17 aa, Artificial Sequence
  Made in Lab - cleavable peptide linker
GPLGLAGRSENPGPASG

SEQ ID NO: 36 - protein, 17 aa, Artificial Sequence
  Made in Lab - cleavable peptide linker
GPLGLAGRSDNLGPASG

SEQ ID NO: 37 - protein, 17 aa, Artificial Sequence
  Made in Lab - cleavable peptide linker
GPLGLAGRNAQVGPASG

SEQ ID NO: 38 - protein, 12 aa, Artificial Sequence
  Made in Lab - cleavable peptide linker
GSLSGRSDNAGS

SEQ ID NO: 39 - protein, 12 aa, Artificial Sequence
  Made in Lab - cleavable peptide linker
GSLSGRSDNDGS

SEQ ID NO: 40 - protein, 12 aa, Artificial Sequence
  Made in Lab - cleavable peptide linker
GSLSGRSDNEGS

SEQ ID NO: 41 - protein, 12 aa, Artificial Sequence
  Made in Lab - cleavable peptide linker
GSLSGRSDNFGS

SEQ ID NO: 42 - protein, 12 aa, Artificial Sequence
  Made in Lab - cleavable peptide linker
GSLSGRSDNGGS

SEQ ID NO: 43 - protein, 12 aa, Artificial Sequence
  Made in Lab - cleavable peptide linker
GSLSGRSDNIGS

SEQ ID NO: 44 - protein, 12 aa, Artificial Sequence
  Made in Lab - cleavable peptide linker
GSLSGRSDNKGS

SEQ ID NO: 45 - protein, 12 aa, Artificial Sequence
  Made in Lab - cleavable peptide linker
GSLSGRSDNLGS

SEQ ID NO: 46 - protein, 12 aa, Artificial Sequence
  Made in Lab - cleavable peptide linker
GSLSGRSDNMGS

SEQ ID NO: 47 - protein, 12 aa, Artificial Sequence
  Made in Lab - cleavable peptide linker
GSLSGRSDNNGS

SEQ ID NO: 48 - protein, 12 aa, Artificial Sequence
  Made in Lab - cleavable peptide linker
GSLSGRSDNPGS

SEQ ID NO: 49 - protein, 12 aa, Artificial Sequence
  Made in Lab - cleavable peptide linker
GSLSGRSDNQGS

SEQ ID NO: 50 - protein, 12 aa, Artificial Sequence
  Made in Lab - cleavable peptide linker
GSLSGRSDNRGS

SEQ ID NO: 51 - protein, 12 aa, Artificial Sequence
  Made in Lab - cleavable peptide linker
GSLSGRSDNSGS

SEQ ID NO: 52 - protein, 12 aa, Artificial Sequence
  Made in Lab - cleavable peptide linker
GSLSGRSDNTGS

SEQ ID NO: 53 - protein, 12 aa, Artificial Sequence
  Made in Lab - cleavable peptide linker
GSLSGRSDNVGS

SEQ ID NO: 54 - protein, 12 aa, Artificial Sequence
  Made in Lab - cleavable peptide linker
GSLSGRSDNWGS

SEQ ID NO: 55 - protein, 12 aa, Artificial Sequence
  Made in Lab - cleavable peptide linker
GSLSGRSDNYGS

SEQ ID NO: 56 - protein, 12 aa, Artificial Sequence
  Made in Lab - cleavable peptide linker
GSLSGRSANDGS

SEQ ID NO: 57 - protein, 12 aa, Artificial Sequence
  Made in Lab - cleavable peptide linker
GSLSGRSANEGS

SEQ ID NO: 58 - protein, 12 aa, Artificial Sequence
  Made in Lab - cleavable peptide linker
GSLSGRSANFGS

SEQ ID NO: 59 - protein, 12 aa, Artificial Sequence
  Made in Lab - cleavable peptide linker
GSLSGRSANGSS

SEQ ID NO: 60 - protein, 12 aa, Artificial Sequence
  Made in Lab - cleavable peptide linker
GSLSGRSANHGS

SEQ ID NO: 61 - protein, 12 aa, Artificial Sequence
  Made in Lab - cleavable peptide linker
GSLSGRSANIGS

SEQ ID NO: 62 - protein, 12 aa, Artificial Sequence
  Made in Lab - cleavable peptide linker
GSLSGRSANKGS

SEQ ID NO: 63 - protein, 12 aa, Artificial Sequence
  Made in Lab - cleavable peptide linker
GSLSGRSANLGS

SEQ ID NO: 64 - protein, 12 aa, Artificial Sequence
  Made in Lab - cleavable peptide linker
GSLSGRSANMGS

SEQ ID NO: 65 - protein, 12 aa, Artificial Sequence
  Made in Lab - cleavable peptide linker
GSLSGRSANNGS

SEQ ID NO: 66 - protein, 12 aa, Artificial Sequence
  Made in Lab - cleavable peptide linker
GSLSGRSANPGS

SEQ ID NO: 67 - protein, 12 aa, Artificial Sequence
  Made in Lab - cleavable peptide linker
GSLSGRSANQSS

SEQ ID NO: 68 - protein, 12 aa, Artificial Sequence
  Made in Lab - cleavable peptide linker
GSLSGRSANRGS

SEQ ID NO: 69 - protein, 12 aa, Artificial Sequence
  Made in Lab - cleavable peptide linker
GSLSGRSANSGS

SEQ ID NO: 70 - protein, 12 aa, Artificial Sequence
  Made in Lab - cleavable peptide linker
GSLSGRSANTGS

SEQ ID NO: 71 - protein, 12 aa, Artificial Sequence
  Made in Lab - cleavable peptide linker
GSLSGRSANVGS

SEQ ID NO: 72 - protein, 12 aa, Artificial Sequence
  Made in Lab - cleavable peptide linker
GSLSGRSANWGS

SEQ ID NO: 73 - protein, 12 aa, Artificial Sequence
  Made in Lab - cleavable peptide linker
GSLSGRSANYSS

SEQ ID NO: 74 - protein, 14 aa, Artificial Sequence
  Made in Lab - cleavable peptide linker
GPLGLAGRSDNHSG

SEQ ID NO: 75 - protein, 13 aa, Artificial Sequence
  Made in Lab - cleavable peptide linker
PLGLAGSGRSDNR

SEQ ID NO: 76 - protein, 15 aa, Artificial Sequence
  Made in Lab - cleavable peptide linker
PLGLAGSGRSDNRGS

SEQ ID NO: 77 - protein, 17 aa, Artificial Sequence
  Made in Lab - cleavable peptide linker
GSPLGLAGSGRSDNRGS

SEQ ID NO: 78 - protein, 15 aa, Artificial Sequence
  Made in Lab - cleavable peptide linker
PLGLAGSGRSDNRGA

SEQ ID NO: 79 - protein, 15 aa, Artificial Sequence
  Made in Lab - cleavable peptide linker
PLGLAGSGRSDNQGA

SEQ ID NO: 80 - protein, 15 aa, Artificial Sequence
  Made in Lab - cleavable peptide linker
PLGLAGSGRSDNYGA

SEQ ID NO: 81 - protein, 15 aa, Artificial Sequence
  Made in Lab - cleavable peptide linker
GPLGLAGSGRSDNQG

SEQ ID NO: 82 - protein, 17 aa, Artificial Sequence
  Made in Lab - cleavable peptide linker
GSPLGLAGSGRSDNQGA

SEQ ID NO: 83 - protein, 19 aa, Artificial Sequence
  Made in Lab - cleavable peptide linker
GGSPLGLAGSGRSDNQGGA

SEQ ID NO: 84 - protein, 21 aa, Artificial Sequence
  Made in Lab - cleavable peptide linker
GGGSPLGLAGSGRSDNQGGGA

SEQ ID NO: 85 - protein, 23 aa, Artificial Sequence
  Made in Lab - cleavable peptide linker
GGSGSPLGLAGSGRSDNQGGGGA

SEQ ID NO: 86 - protein, 25 aa, Artificial Sequence
  Made in Lab - cleavable peptide linker
GGSGGSPLGLAGSGRSDNQGGSGGA

SEQ ID NO: 87 - protein, 15 aa, Artificial Sequence
  Made in Lab - cleavable peptide linker
GPLGLAGSGRSDNRG

SEQ ID NO: 88 - protein, 17 aa, Artificial Sequence
  Made in Lab - cleavable peptide linker
GSPLGLAGSGRSDNRGA

SEQ ID NO: 89 - protein, 19 aa, Artificial Sequence
  Made in Lab - cleavable peptide linker
GGSPLGLAGSGRSDNRGGA

SEQ ID NO: 90 - protein, 21 aa, Artificial Sequence
  Made in Lab - cleavable peptide linker
GGGSPLGLAGSGRSDNRGGGA

SEQ ID NO: 91 - protein, 23 aa, Artificial Sequence
  Made in Lab - cleavable peptide linker
GGSGSPLGLAGSGRSDNRGGGGA

SEQ ID NO: 92 - protein, 25 aa, Artificial Sequence
  Made in Lab - cleavable peptide linker
GGSGGSPLGLAGSGRSDNRGGSGGA

SEQ ID NO: 93 - protein, 25 aa, Artificial Sequence
  Made in Lab - cleavable peptide linker
GGSGGSPLGLAGSGRSDNHGGSGGA

SEQ ID NO: 94 - protein, 15 aa, Artificial Sequence
  Made in Lab - cleavable peptide linker
PLGLAGSGRSDNQGA

SEQ ID NO: 95 - protein, 16 aa, Artificial Sequence
  Made in Lab - cleavable peptide linker
GPLGLAGSGRSDNQGA

SEQ ID NO: 96 - protein, 17 aa, Artificial Sequence
  Made in Lab - cleavable peptide linker
GGPLGLAGSGRSDNQGA

SEQ ID NO: 97 - protein, 19 aa, Artificial Sequence
  Made in Lab - cleavable peptide linker
GGSPLGLAGSGRSDNHGGA

SEQ ID NO: 98 - protein, 19 aa, Artificial Sequence
  Made in Lab - cleavable peptide linker
GGSPLGLAGSGRSDNQGGA

SEQ ID NO: 99 - protein, 19 aa, Artificial Sequence
  Made in Lab - cleavable peptide linker
GGSPLGLAGSGRSDNRGGA

SEQ ID NO: 100 - protein, 19 aa, Artificial Sequence
  Made in Lab - cleavable peptide linker
GGSPLGLAGSGRSDNTGGA

SEQ ID NO: 101 - protein, 13 aa, Artificial Sequence
  Made in Lab - cleavable peptide linker
GGGSGRSDNHGGA

SEQ ID NO: 102 - protein, 14 aa, Artificial Sequence
  Made in Lab - cleavable peptide linker
GGGGSGRSDNHGGA

SEQ ID NO: 103 - protein, 16 aa, Artificial Sequence
  Made in Lab - cleavable peptide linker
GGGGSSGRSDNHGGGA

SEQ ID NO: 104 - protein, 18 aa, Artificial Sequence
  Made in Lab - cleavable peptide linker
GGSGGSSGRSDNHGGGGA

SEQ ID NO: 105 - protein, 19 aa, Artificial Sequence
  Made in Lab - cleavable peptide linker
GGSGGSSGRSDNHGGSGGA

SEQ ID NO: 106 - protein, 12 aa, Artificial Sequence
  Made in Lab - cleavable peptide linker
GGSGRSDNHGGA

SEQ ID NO: 107 - protein, 15 aa, Artificial Sequence
  Made in Lab - cleavable peptide linker
GGSGGSGRSDNHGGA

SEQ ID NO: 108 - protein, 9 aa, Artificial Sequence
  Made in Lab - cleavable peptide linker
GSPLGLAGS

SEQ ID NO: 109 - protein, 11 aa, Artificial Sequence
  Made in Lab - cleavable peptide linker
GGSPLGLAGGS

SEQ ID NO: 110 - protein, 12 aa, Artificial Sequence
  Made in Lab - cleavable peptide linker
GGSPLGLAGGGS

SEQ ID NO: 111 - protein, 13 aa, Artificial Sequence
  Made in Lab - cleavable peptide linker
GGGSPLGLAGGGS

SEQ ID NO: 112 - protein, 14 aa, Artificial Sequence
  Made in Lab - cleavable peptide linker
GGGSPLGLAGGGGS

SEQ ID NO: 113 - protein, 15 aa, Artificial Sequence
  Made in Lab - cleavable peptide linker
GGSGGGPLGLAGGGA

SEQ ID NO: 114 - protein, 15 aa, Artificial Sequence
  Made in Lab - cleavable peptide linker
GGSGGSGRSDNHGGA

SEQ ID NO: 115 - protein, 4 aa, Artificial Sequence
  Made in Lab - cleavable peptide linker
GRGD

SEQ ID NO: 116 - protein, 5 aa, Artificial Sequence
  Made in Lab - cleavable peptide linker
GRGDN

SEQ ID NO: 117 - protein, 5 aa, Artificial Sequence
  Made in Lab - cleavable peptide linker
GRGDS

SEQ ID NO: 118 - protein, 7 aa, Artificial Sequence
  Made in Lab - cleavable peptide linker
GRGDSPK

SEQ ID NO: 119 - protein, 4 aa, Artificial Sequence
  Made in Lab - cleavable peptide linker
AAPV

SEQ ID NO: 120 - protein, 4 aa, Artificial Sequence
  Made in Lab - cleavable peptide linker
AAPL

SEQ ID NO: 121 - protein, 4 aa, Artificial Sequence
  Made in Lab - cleavable peptide linker
AAPF

SEQ ID NO: 122 - protein, 4 aa, Artificial Sequence
  Made in Lab - cleavable peptide linker
AAPA

SEQ ID NO: 123 - protein, 4 aa, Artificial Sequence
  Made in Lab - cleavable peptide linker
AYLV

SEQ ID NO: 124 - protein, 6 aa, Artificial Sequence
  Made in Lab - cleavable peptide linker
  MOD_RES (3)..(3): X = Any amino acid
  MOD_RES (6)..(6): X = Any amino acid
GPXGPX

SEQ ID NO: 125 - protein, 4 aa, Artificial Sequence
  Made in Lab - cleavable peptide linker
  MOD_RES (4)..(4): X = Any amino acid
LGPX

SEQ ID NO: 126 - protein, 6 aa, Artificial Sequence
  Made in Lab - cleavable peptide linker
  MOD_RES (6)..(6): X = Any amino acid
GPIGPX

SEQ ID NO: 127 - protein, 5 aa, Artificial Sequence
  Made in Lab - cleavable peptide linker
  MOD_RES (5)..(5): X = Any amino acid
APGLX

SEQ ID NO: 128 - protein, 7 aa, Artificial Sequence
  Made in Lab - cleavable peptide linker
  MOD_RES (7)..(7): X = Any amino acid
PLGPDRX

SEQ ID NO: 129 - protein, 7 aa, Artificial Sequence
  Made in Lab - cleavable peptide linker
  MOD_RES (7)..(7): X = Any amino acid
PLGLLGX

SEQ ID NO: 130 - protein, 7 aa, Artificial Sequence
  Made in Lab - cleavable peptide linker
PQGIAGW

SEQ ID NO: 131 - protein, 5 aa, Artificial Sequence
  Made in Lab - cleavable peptide linker
PLGCH

SEQ ID NO: 132 - protein, 6 aa, Artificial Sequence
  Made in Lab - cleavable peptide linker
PLGLYA

SEQ ID NO: 133 - protein, 7 aa, Artificial Sequence
  Made in Lab - cleavable peptide linker
PLALWAR

SEQ ID NO: 134 - protein, 7 aa, Artificial Sequence
  Made in Lab - cleavable peptide linker
PLAYWAR

SEQ ID NO: 135 - protein, 7 aa, Artificial Sequence
  Made in Lab - cleavable peptide linker
PYAYYMR

SEQ ID NO: 136 - protein, 7 aa, Artificial Sequence
  Made in Lab - cleavable peptide linker
PLGMYSR

SEQ ID NO: 137 - protein, 4 aa, Artificial Sequence
  Made in Lab - cleavable peptide linker
GDKP

SEQ ID NO: 138 - protein, 5 aa, Artificial Sequence
  Made in Lab - cleavable peptide linker
GSDKP

SEQ ID NO: 139 - protein, 4 aa, Artificial Sequence
  Made in Lab - cleavable peptide linker
VLAL

SEQ ID NO: 140 - protein, 4 aa, Artificial Sequence
  Made in Lab - cleavable peptide linker
GFLG

SEQ ID NO: 141 - protein, 4 aa, Artificial Sequence
  Made in Lab - non-cleavable peptide linker
GSGS

SEQ ID NO: 142 - protein, 4 aa, Artificial Sequence
  Made in Lab - non-cleavable peptide linker
GGSG

SEQ ID NO: 143 - protein, 4 aa, Artificial Sequence
  Made in Lab - non-cleavable peptide linker
GGGS

SEQ ID NO: 144 - protein, 5 aa, Artificial Sequence
  Made in Lab - non-cleavable peptide linker
GGGGS

SEQ ID NO: 145 - protein, 4 aa, Artificial Sequence
  Made in Lab - non-cleavable peptide linker
GNGN

SEQ ID NO: 146 - protein, 4 aa, Artificial Sequence
  Made in Lab - non-cleavable peptide linker
GGNG

SEQ ID NO: 147 - protein, 4 aa, Artificial Sequence
  Made in Lab - non-cleavable peptide linker
GGGN

SEQ ID NO: 148 - protein, 5 aa, Artificial Sequence
  Made in Lab - non-cleavable peptide linker
GGGGN

SEQ ID NO: 149 - protein, 15 aa, Artificial Sequence
  Made in Lab - non-cleavable peptide linker
GGGGSGGGGSGGGGS

SEQ ID NO: 150 - protein, 22 aa, Artificial Sequence
  Made in Lab - non-cleavable peptide linker
GSGGGGSGGGGSGGGGSGGGGS

SEQ ID NO: 151 - protein, 30 aa, Artificial Sequence
  Made in Lab - non-cleavable peptide linker
GGGGSGGGGSGGGGSGGGGSGGGGSGGGGS

SEQ ID NO: 152 - protein, 25 aa, Artificial Sequence
  Made in Lab - non-cleavable peptide linker
DAAAKEAAAKDAAAREAAARDAAAK

SEQ ID NO: 153 - protein, 14 aa, Artificial Sequence
  Made in Lab - non-cleavable peptide linker
NVDHKPSNTKVDKR

SEQ ID NO: 154 - protein, 5 aa, Artificial Sequence
  Made in Lab - non-cleavable peptide linker
DGGGS

SEQ ID NO: 155 - protein, 5 aa, Artificial Sequence
  Made in Lab - non-cleavable peptide linker
TGEKP

SEQ ID NO: 156 - protein, 4 aa, Artificial Sequence
  Made in Lab - non-cleavable peptide linker
GGRR

SEQ ID NO: 157 - protein, 14 aa, Artificial Sequence
  Made in Lab - non-cleavable peptide linker
EGKSSGSGSESKVD

SEQ ID NO: 158 - protein, 18 aa, Artificial Sequence
  Made in Lab - non-cleavable peptide linker
KESGSVSSEQLAQFRSLD

SEQ ID NO: 159 - protein, 8 aa, Artificial Sequence
  Made in Lab - non-cleavable peptide linker
GGRRGGGS

SEQ ID NO: 160 - protein, 9 aa, Artificial Sequence
  Made in Lab - non-cleavable peptide linker
LRQRDGERP

SEQ ID NO: 161 - protein, 12 aa, Artificial Sequence
  Made in Lab - non-cleavable peptide linker
LRQKDGGGSERP

SEQ ID NO: 162 - protein, 13 aa, Artificial Sequence
  Made in Lab - non-cleavable peptide linker
LRQKDGGGSGGGS

SEQ ID NO: 163 - protein, 11 aa, Artificial Sequence
  Mad in Lab - affinity purification peptide tag
YTDIEMNRLGK

SEQ ID NO: 164 - protein, 6 aa, Artificial Sequence
  Mad in Lab - affinity purification peptide tag
HTTPHH

SEQ ID NO: 165 - protein, 8 aa, Artificial Sequence
  Mad in Lab - affinity purification peptide tag
WSHPQFEK

SEQ ID NO: 166 - protein, 9 aa, Artificial Sequence
  Mad in Lab - affinity purification peptide tag
AWAHPQPGG

SEQ ID NO: 167 - protein, 15 aa, Artificial Sequence
  Mad in Lab - affinity purification peptide tag
KETAAAKFERQHMDS

SEQ ID NO: 168 - protein, 9 aa, Artificial Sequence
  Mad in Lab - affinity purification peptide tag
NANNPDWDF

SEQ ID NO: 169 - protein, 11 aa, Artificial Sequence
  Mad in Lab - affinity purification peptide tag
CEQKLISEEDL

SEQ ID NO: 170 - protein, 11 aa, Artificial Sequence
  Mad in Lab - affinity purification peptide tag
KPPTPPPEPET

SEQ ID NO: 171 - protein, 8 aa, Artificial Sequence
  Mad in Lab - affinity purification peptide tag
QPELAPED

SEQ ID NO: 172 - protein, 19 aa, Artificial Sequence
  Mad in Lab - affinity purification peptide tag
KDHLIHNVHKEFHAHAHNK

SEQ ID NO: 173 - protein, 7 aa, Artificial Sequence
  Mad in Lab - affinity purification peptide tag
DYKDDDK

SEQ ID NO: 174 - protein, 10 aa, Artificial Sequence
  Mad in Lab - affinity purification peptide tag
SSTSSDFRDR

SEQ ID NO: 175 - protein, 14 aa, Artificial Sequence
  Mad in Lab - affinity purification peptide tag
GKPIPNPLLGLDST

SEQ ID NO: 176 - protein, 11 aa, Artificial Sequence
  Mad in Lab - affinity purification peptide tag
MASMTGGQQMG

SEQ ID NO: 177 - protein, 6 aa, Artificial Sequence
  Mad in Lab - affinity purification peptide tag
TDFYLK

SEQ ID NO: 178 - protein, 6 aa, Artificial Sequence
  Mad in Lab - affinity purification peptide tag
DTYRYI

SEQ ID NO: 179 - protein, 315 aa, Artificial Sequence
  Made in Lab - P1522 Activatable Proprotein construct
APTSSSTKKTQLQLEHLLLDLQMILNGINNYKNPKLTRMLTFKFYMPKKATELKHLQCLEEELKPLEEALNLAPSKNFHLRPRDLISNINVIVLELKGSETTFMCEYADETATIVEFLNRWITFSQSTISTLTGGGGSELCDDDPPEIPHATFKAMAYKEGTMLNCECKRGFRRIKSGSLYMLCTGNSSHSSWDNQCQCTSSATRNTTKQVTPQPEEQKERKTTEMQSPMQPVDQASLPGHCREPPPWENEATERIYHFVVGQMVYYQCVQGYRALHRGPAESVCKMTHGKTRWTQPQLICTGEGGGGSHHHHHH

SEQ ID NO: 180 - protein, 547 aa, Artificial Sequence
  Made in Lab - P1523 Activatable Proprotein construct
EPKSSDKTHTCPPCPAPELLGGPSVFLFPPKPKDTLMISRTPEVTCVVVDVSHEDPEVKFNWYVDGVEVHNAKTKPREEQYNSTYRVVSVLTVLHQDWLNGKEYKCKVSNKALPAPIEKTISKAKGQPREPQVYTLPPSREEMTKNQVSLTCLVKGFYPSDIAVEWESNGQPENNYKTTPPVLDSDGSFFLYSKLTVDKSRWQQGNVFSCSVMHEALHNHYTQKSLSLSPGKGSENLYFQGGSAPTSSSTKKTQLQLEHLLLDLQMILNGINNYKNPKLTRMLTFKFYMPKKATELKHLQCLEEELKPLEEALNLAPSKNFHLRPRDLISNINVIVLELKGSETTFMCEYADETATIVEFLNRWITFSQSTISTLTGGGGSELCDDDPPEIPHATFKAMAYKEGTMLNCECKRGFRRIKSGSLYMLCTGNSSHSSWDNQCQCTSSATRNTTKQVTPQPEEQKERKTTEMQSPMQPVDQASLPGHCREPPPWENEATERIYHFVVGQMVYYQCVQGYRALHRGPAESVCKMTHGKTRWTQPQLICTGE

SEQ ID NO: 181 - protein, 240 aa, Artificial Sequence
  Made in Lab - P1523 cleaved protein construct
EPKSSDKTHTCPPCPAPELLGGPSVFLFPPKPKDTLMISRTPEVTCVVVDVSHEDPEVKFNWYVDGVEVHNAKTKPREEQYNSTYRVVSVLTVLHQDWLNGKEYKCKVSNKALPAPIEKTISKAKGQPREPQVYTLPPSREEMTKNQVSLTCLVKGFYPSDIAVEWESNGQPENNYKTTPPVLDSDGSFFLYSKLTVDKSRWQQGNVFSCSVMHEALHNHYTQKSLSLSPGKGSENLYFQ

SEQ ID NO: 182 - protein, 307 aa, Artificial Sequence
  Made in Lab - P1523 cleaved protein construct
GGSAPTSSSTKKTQLQLEHLLLDLQMILNGINNYKNPKLTRMLTFKFYMPKKATELKHLQCLEEELKPLEEALNLAPSKNFHLRPRDLISNINVIVLELKGSETTFMCEYADETATIVEFLNRWITFSQSTISTLTGGGGSELCDDDPPEIPHATFKAMAYKEGTMLNCECKRGFRRIKSGSLYMLCTGNSSHSSWDNQCQCTSSATRNTTKQVTPQPEEQKERKTTEMQSPMQPVDQASLPGHCREPPPWENEATERIYHFVVGQMVYYQCVQGYRALHRGPAESVCKMTHGKTRWTQPQLICTGE

SEQ ID NO: 183 - protein, 547 aa, Artificial Sequence; identical to SEQ ID NO: 180
  Made in Lab - P1523 cleaved protein construct

SEQ ID NO: 184 - protein, 240 aa, Artificial Sequence; identical to SEQ ID NO: 181
  Made in Lab - P1523 cleaved protein construct

SEQ ID NO: 185 - protein, 307 aa, Artificial Sequence; identical to SEQ ID NO: 182
  Made in Lab - P1523 cleaved protein construct

SEQ ID NO: 186 - protein, 545 aa, Artificial Sequence
  Made in Lab - P1524 Activatable Proprotein construct
APTSSSTKKTQLQLEHLLLDLQMILNGINNYKNPKLTRMLTFKFYMPKKATELKHLQCLEEELKPLEEALNLAPSKNFHLRPRDLISNINVIVLELKGSETTFMCEYADETATIVEFLNRWITFSQSTISTLTGGGGSELCDDDPPEIPHATFKAMAYKEGTMLNCECKRGFRRIKSGSLYMLCTGNSSHSSWDNQCQCTSSATRNTTKQVTPQPEEQKERKTTEMQSPMQPVDQASLPGHCREPPPWENEATERIYHFVVGQMVYYQCVQGYRALHRGPAESVCKMTHGKTRWTQPQLICTGEGSENLYFQGEPKSSDKTHTCPPCPAPELLGGPSVFLFPPKPKDTLMISRTPEVTCVVVDVSHEDPEVKFNWYVDGVEVHNAKTKPREEQYNSTYRVVSVLTVLHQDWLNGKEYKCKVSNKALPAPIEKTISKAKGQPREPQVYTLPPSREEMTKNQVSLTCLVKGFYPSDIAVEWESNGQPENNYKTTPPVLDSDGSFFLYSKLTVDKSRWQQGNVFSCSVMHEALHNHYTQKSLSLSPGK

SEQ ID NO: 187 - protein, 320 aa, Artificial Sequence
  Made in Lab - P1525 Activatable Proprotein construct
APTSSSTKKTQLQLEHLLLDLQMILNGINNYKNPKLTRMLTFKFYMPKKATELKHLQCLEEELKPLEEALNLAPSKNFHLRPRDLISNINVIVLELKGSETTFMCEYADETATIVEFLNRWITFSQSTISTLTGGGGSGGGGSELCDDDPPEIPHATFKAMAYKEGTMLNCECKRGFRRIKSGSLYMLCTGNSSHSSWDNQCQCTSSATRNTTKQVTPQPEEQKERKTTEMQSPMQPVDQASLPGHCREPPPWENEATERIYHFVVGQMVYYQCVQGYRALHRGPAESVCKMTHGKTRWTQPQLICTGEGGGGSHHHHHH

SEQ ID NO: 188 - protein, 552 aa, Artificial Sequence
  Made in Lab - P1526 Activatable Proprotein construct
EPKSSDKTHTCPPCPAPELLGGPSVFLFPPKPKDTLMISRTPEVTCVVVDVSHEDPEVKFNWYVDGVEVHNAKTKPREEQYNSTYRVVSVLTVLHQDWLNGKEYKCKVSNKALPAPIEKTISKAKGQPREPQVYTLPPSREEMTKNQVSLTCLVKGFYPSDIAVEWESNGQPENNYKTTPPVLDSDGSFFLYSKLTVDKSRWQQGNVFSCSVMHEALHNHYTQKSLSLSPGKGSENLYFQGGSAPTSSSTKKTQLQLEHLLLDLQMILNGINNYKNPKLTRMLTFKFYMPKKATELKHLQCLEEELKPLEEALNLAPSKNFHLRPRDLISNINVIVLELKGSETTFMCEYADETATIVEFLNRWITFSQSTISTLTGGGGSGGGGSELCDDDPPEIPHATFKAMAYKEGTMLNCECKRGFRRIKSGSLYMLCTGNSSHSSWDNQCQCTSSATRNTTKQVTPQPEEQKERKTTEMQSPMQPVDQASLPGHCREPPPWENEATERIYHFVVGQMVYYQCVQGYRALHRGPAESVCKMTHGKTRWTQPQLICTGE

SEQ ID NO: 189 - protein, 550 aa, Artificial Sequence
  Made in Lab - P1527 Activatable Proprotein construct
APTSSSTKKTQLQLEHLLLDLQMILNGINNYKNPKLTRMLTFKFYMPKKATELKHLQCLEEELKPLEEALNLAPSKNFHLRPRDLISNINVIVLELKGSETTFMCEYADETATIVEFLNRWITFSQSTISTLTGGGGSGGGGSELCDDDPPEIPHATFKAMAYKEGTMLNCECKRGFRRIKSGSLYMLCTGNSSHSSWDNQCQCTSSATRNTTKQVTPQPEEQKERKTTEMQSPMQPVDQASLPGHCREPPPWENEATERIYHFVVGQMVYYQCVQGYRALHRGPAESVCKMTHGKTRWTQPQLICTGEGSENLYFQGEPKSSDKTHTCPPCPAPELLGGPSVFLFPPKPKDTLMISRTPEVTCVVVDVSHEDPEVKFNWYVDGVEVHNAKTKPREEQYNSTYRVVSVLTVLHQDWLNGKEYKCKVSNKALPAPIEKTISKAKGQPREPQVYTLPPSREEMTKNQVSLTCLVKGFYPSDIAVEWESNGQPENNYKTTPPVLDSDGSFFLYSKLTVDKSRWQQGNVFSCSVMHEALHNHYTQKSLSLSPGK

SEQ ID NO: 190 - protein, 315 aa, Artificial Sequence
  Made in Lab - P1528 Activatable Proprotein construct
ELCDDDPPEIPHATFKAMAYKEGTMLNCECKRGFRRIKSGSLYMLCTGNSSHSSWDNQCQCTSSATRNTTKQVTPQPEEQKERKTTEMQSPMQPVDQASLPGHCREPPPWENEATERIYHFVVGQMVYYQCVQGYRALHRGPAESVCKMTHGKTRWTQPQLICTGEGGGGSAPTSSSTKKTQLQLEHLLLDLQMILNGINNYKNPKLTRMLTFKFYMPKKATELKHLQCLEEELKPLEEALNLAPSKNFHLRPRDLISNINVIVLELKGSETTFMCEYADETATIVEFLNRWITFSQSTISTLTGGGGSHHHHHH

SEQ ID NO: 191 - protein, 547 aa, Artificial Sequence
  Made in Lab - P1529 Activatable Proprotein construct
EPKSSDKTHTCPPCPAPELLGGPSVFLFPPKPKDTLMISRTPEVTCVVVDVSHEDPEVKFNWYVDGVEVHNAKTKPREEQYNSTYRVVSVLTVLHQDWLNGKEYKCKVSNKALPAPIEKTISKAKGQPREPQVYTLPPSREEMTKNQVSLTCLVKGFYPSDIAVEWESNGQPENNYKTTPPVLDSDGSFFLYSKLTVDKSRWQQGNVFSCSVMHEALHNHYTQKSLSLSPGKGSENLYFQGGSELCDDDPPEIPHATFKAMAYKEGTMLNCECKRGFRRIKSGSLYMLCTGNSSHSSWDNQCQCTSSATRNTTKQVTPQPEEQKERKTTEMQSPMQPVDQASLPGHCREPPPWENEATERIYHFVVGQMVYYQCVQGYRALHRGPAESVCKMTHGKTRWTQPQLICTGEGGGGSAPTSSSTKKTQLQLEHLLLDLQMILNGINNYKNPKLTRMLTFKFYMPKKATELKHLQCLEEELKPLEEALNLAPSKNFHLRPRDLISNINVIVLELKGSETTFMCEYADETATIVEFLNRWITFSQSTISTLT

SEQ ID NO: 192 - protein, 545 aa, Artificial Sequence
  Made in Lab - P1530 Activatable Proprotein construct
ELCDDDPPEIPHATFKAMAYKEGTMLNCECKRGFRRIKSGSLYMLCTGNSSHSSWDNQCQCTSSATRNTTKQVTPQPEEQKERKTTEMQSPMQPVDQASLPGHCREPPPWENEATERIYHFVVGQMVYYQCVQGYRALHRGPAESVCKMTHGKTRWTQPQLICTGEGGGGSAPTSSSTKKTQLQLEHLLLDLQMILNGINNYKNPKLTRMLTFKFYMPKKATELKHLQCLEEELKPLEEALNLAPSKNFHLRPRDLISNINVIVLELKGSETTFMCEYADETATIVEFLNRWITFSQSTISTLTGSENLYFQGEPKSSDKTHTCPPCPAPELLGGPSVFLFPPKPKDTLMISRTPEVTCVVVDVSHEDPEVKFNWYVDGVEVHNAKTKPREEQYNSTYRVVSVLTVLHQDWLNGKEYKCKVSNKALPAPIEKTISKAKGQPREPQVYTLPPSREEMTKNQVSLTCLVKGFYPSDIAVEWESNGQPENNYKTTPPVLDSDGSFFLYSKLTVDKSRWQQGNVFSCSVMHEALHNHYTQKSLSLSPGK

SEQ ID NO: 193 - protein, 320 aa, Artificial Sequence
  Made in Lab - P1531 Activatable Proprotein construct
ELCDDDPPEIPHATFKAMAYKEGTMLNCECKRGFRRIKSGSLYMLCTGNSSHSSWDNQCQCTSSATRNTTKQVTPQPEEQKERKTTEMQSPMQPVDQASLPGHCREPPPWENEATERIYHFVVGQMVYYQCVQGYRALHRGPAESVCKMTHGKTRWTQPQLICTGEGGGGSGGGGSAPTSSSTKKTQLQLEHLLLDLQMILNGINNYKNPKLTRMLTFKFYMPKKATELKHLQCLEEELKPLEEALNLAPSKNFHLRPRDLISNINVIVLELKGSETTFMCEYADETATIVEFLNRWITFSQSTISTLTGGGGSHHHHHH

SEQ ID NO: 194 - protein, 552 aa, Artificial Sequence
  Made in Lab - P1532 Activatable Proprotein construct
EPKSSDKTHTCPPCPAPELLGGPSVFLFPPKPKDTLMISRTPEVTCVVVDVSHEDPEVKFNWYVDGVEVHNAKTKPREEQYNSTYRVVSVLTVLHQDWLNGKEYKCKVSNKALPAPIEKTISKAKGQPREPQVYTLPPSREEMTKNQVSLTCLVKGFYPSDIAVEWESNGQPENNYKTTPPVLDSDGSFFLYSKLTVDKSRWQQGNVFSCSVMHEALHNHYTQKSLSLSPGKGSENLYFQGGSELCDDDPPEIPHATFKAMAYKEGTMLNCECKRGFRRIKSGSLYMLCTGNSSHSSWDNQCQCTSSATRNTTKQVTPQPEEQKERKTTEMQSPMQPVDQASLPGHCREPPPWENEATERIYHFVVGQMVYYQCVQGYRALHRGPAESVCKMTHGKTRWTQPQLICTGEGGGGSGGGGSAPTSSSTKKTQLQLEHLLLDLQMILNGINNYKNPKLTRMLTFKFYMPKKATELKHLQCLEEELKPLEEALNLAPSKNFHLRPRDLISNINVIVLELKGSETTFMCEYADETATIVEFLNRWITFSQSTISTLT

SEQ ID NO: 195 - protein, 550 aa, Artificial Sequence
  Made in Lab - P1533 Activatable Proprotein construct
ELCDDDPPEIPHATFKAMAYKEGTMLNCECKRGFRRIKSGSLYMLCTGNSSHSSWDNQCQCTSSATRNTTKQVTPQPEEQKERKTTEMQSPMQPVDQASLPGHCREPPPWENEATERIYHFVVGQMVYYQCVQGYRALHRGPAESVCKMTHGKTRWTQPQLICTGEGGGGSGGGGSAPTSSSTKKTQLQLEHLLLDLQMILNGINNYKNPKLTRMLTFKFYMPKKATELKHLQCLEEELKPLEEALNLAPSKNFHLRPRDLISNINVIVLELKGSETTFMCEYADETATIVEFLNRWITFSQSTISTLTGSENLYFQGEPKSSDKTHTCPPCPAPELLGGPSVFLFPPKPKDTLMISRTPEVTCVVVDVSHEDPEVKFNWYVDGVEVHNAKTKPREEQYNSTYRVVSVLTVLHQDWLNGKEYKCKVSNKALPAPIEKTISKAKGQPREPQVYTLPPSREEMTKNQVSLTCLVKGFYPSDIAVEWESNGQPENNYKTTPPVLDSDGSFFLYSKLTVDKSRWQQGNVFSCSVMHEALHNHYTQKSLSLSPGK

SEQ ID NO: 196 - protein, 321 aa, Artificial Sequence
  Made in Lab - P1630 Activatable Proprotein construct
APTSSSTKKTQLQLEHLLLDLQMILNGINNYKNPKLTRMLTFKFYMPKKATELKHLQCLEEELKPLEEALNLAPSKNFHLRPRDLISNINVIVLELKGSETTFMCEYADETATIVEFLNRWITFSQSTISTLTGSENLYFQGGSELCDDDPPEIPHATFKAMAYKEGTMLNCECKRGFRRIKSGSLYMLCTGNSSHSSWDNQCQCTSSATRNTTKQVTPQPEEQKERKTTEMQSPMQPVDQASLPGHCREPPPWENEATERIYHFVVGQMVYYQCVQGYRALHRGPAESVCKMTHGKTRWTQPQLICTGEGGGGSHHHHHH

SEQ ID NO: 197 - protein, 141 aa, Artificial Sequence
  Made in Lab - P1630 cleaved protein construct
APTSSSTKKTQLQLEHLLLDLQMILNGINNYKNPKLTRMLTFKFYMPKKATELKHLQCLEEELKPLEEALNLAPSKNFHLRPRDLISNINVIVLELKGSETTFMCEYADETATIVEFLNRWITFSQSTISTLTGSENLYFQ

SEQ ID NO: 198 - protein, 180 aa, Artificial Sequence
  Made in Lab - P1630 cleaved protein construct
GGSELCDDDPPEIPHATFKAMAYKEGTMLNCECKRGFRRIKSGSLYMLCTGNSSHSSWDNQCQCTSSATRNTTKQVTPQPEEQKERKTTEMQSPMQPVDQASLPGHCREPPPWENEATERIYHFVVGQMVYYQCVQGYRALHRGPAESVCKMTHGKTRWTQPQLICTGEGGGGSHHHHHH

SEQ ID NO: 199 - protein, 321 aa, Artificial Sequence; identical to SEQ ID NO: 196
  Made in Lab - P1630 cleaved protein construct

SEQ ID NO: 200 - protein, 141 aa, Artificial Sequence; identical to SEQ ID NO: 197
  Made in Lab - P1630 cleaved protein construct

SEQ ID NO: 201 - protein, 180 aa, Artificial Sequence; identical to SEQ ID NO: 198
  Made in Lab - P1630 cleaved protein construct

SEQ ID NO: 202 - protein, 552 aa, Artificial Sequence
  Made in Lab - P1631 Activatable Proprotein construct
EPKSSDKTHTCPPCPAPELLGGPSVFLFPPKPKDTLMISRTPEVTCVVVDVSHEDPEVKFNWYVDGVEVHNAKTKPREEQYNSTYRVVSVLTVLHQDWLNGKEYKCKVSNKALPAPIEKTISKAKGQPREPQVYTLPPSREEMTKNQVSLTCLVKGFYPSDIAVEWESNGQPENNYKTTPPVLDSDGSFFLYSKLTVDKSRWQQGNVFSCSVMHEALHNHYTQKSLSLSPGKGGGGSGGGGSAPTSSSTKKTQLQLEHLLLDLQMILNGINNYKNPKLTRMLTFKFYMPKKATELKHLQCLEEELKPLEEALNLAPSKNFHLRPRDLISNINVIVLELKGSETTFMCEYADETATIVEFLNRWITFSQSTISTLTGSENLYFQGGSELCDDDPPEIPHATFKAMAYKEGTMLNCECKRGFRRIKSGSLYMLCTGNSSHSSWDNQCQCTSSATRNTTKQVTPQPEEQKERKTTEMQSPMQPVDQASLPGHCREPPPWENEATERIYHFVVGQMVYYQCVQGYRALHRGPAESVCKMTHGKTRWTQPQLICTGE

SEQ ID NO: 203 - protein, 552 aa, Artificial Sequence
  Made in Lab - P1632 Activatable Proprotein construct
APTSSSTKKTQLQLEHLLLDLQMILNGINNYKNPKLTRMLTFKFYMPKKATELKHLQCLEEELKPLEEALNLAPSKNFHLRPRDLISNINVIVLELKGSETTFMCEYADETATIVEFLNRWITFSQSTISTLTGSENLYFQGGSELCDDDPPEIPHATFKAMAYKEGTMLNCECKRGFRRIKSGSLYMLCTGNSSHSSWDNQCQCTSSATRNTTKQVTPQPEEQKERKTTEMQSPMQPVDQASLPGHCREPPPWENEATERIYHFVVGQMVYYQCVQGYRALHRGPAESVCKMTHGKTRWTQPQLICTGEGGGGSGGGGSEPKSSDKTHTCPPCPAPELLGGPSVFLFPPKPKDTLMISRTPEVTCVVVDVSHEDPEVKFNWYVDGVEVHNAKTKPREEQYNSTYRVVSVLTVLHQDWLNGKEYKCKVSNKALPAPIEKTISKAKGQPREPQVYTLPPSREEMTKNQVSLTCLVKGFYPSDIAVEWESNGQPENNYKTTPPVLDSDGSFFLYSKLTVDKSRWQQGNVFSCSVMHEALHNHYTQKSLSLSPGK

SEQ ID NO: 204 - protein, 321 aa, Artificial Sequence
  Made in Lab - P1633 Activatable Proprotein construct
ELCDDDPPEIPHATFKAMAYKEGTMLNCECKRGFRRIKSGSLYMLCTGNSSHSSWDNQCQCTSSATRNTTKQVTPQPEEQKERKTTEMQSPMQPVDQASLPGHCREPPPWENEATERIYHFVVGQMVYYQCVQGYRALHRGPAESVCKMTHGKTRWTQPQLICTGEGSENLYFQGGSAPTSSSTKKTQLQLEHLLLDLQMILNGINNYKNPKLTRMLTFKFYMPKKATELKHLQCLEEELKPLEEALNLAPSKNFHLRPRDLISNINVIVLELKGSETTFMCEYADETATIVEFLNRWITFSQSTISTLTGGGGSHHHHHH

SEQ ID NO: 205 - protein, 552 aa, Artificial Sequence
  Made in Lab - P1634 Activatable Proprotein construct
EPKSSDKTHTCPPCPAPELLGGPSVFLFPPKPKDTLMISRTPEVTCVVVDVSHEDPEVKFNWYVDGVEVHNAKTKPREEQYNSTYRVVSVLTVLHQDWLNGKEYKCKVSNKALPAPIEKTISKAKGQPREPQVYTLPPSREEMTKNQVSLTCLVKGFYPSDIAVEWESNGQPENNYKTTPPVLDSDGSFFLYSKLTVDKSRWQQGNVFSCSVMHEALHNHYTQKSLSLSPGKGGGGSGGGGSELCDDDPPEIPHATFKAMAYKEGTMLNCECKRGFRRIKSGSLYMLCTGNSSHSSWDNQCQCTSSATRNTTKQVTPQPEEQKERKTTEMQSPMQPVDQASLPGHCREPPPWENEATERIYHFVVGQMVYYQCVQGYRALHRGPAESVCKMTHGKTRWTQPQLICTGEGSENLYFQGGSAPTSSSTKKTQLQLEHLLLDLQMILNGINNYKNPKLTRMLTFKFYMPKKATELKHLQCLEEELKPLEEALNLAPSKNFHLRPRDLISNINVIVLELKGSETTFMCEYADETATIVEFLNRWITFSQSTISTLT

SEQ ID NO: 206 - protein, 552 aa, Artificial Sequence
  Made in Lab - P1635 Activatable Proprotein construct
ELCDDDPPEIPHATFKAMAYKEGTMLNCECKRGFRRIKSGSLYMLCTGNSSHSSWDNQCQCTSSATRNTTKQVTPQPEEQKERKTTEMQSPMQPVDQASLPGHCREPPPWENEATERIYHFVVGQMVYYQCVQGYRALHRGPAESVCKMTHGKTRWTQPQLICTGEGSENLYFQGGSAPTSSSTKKTQLQLEHLLLDLQMILNGINNYKNPKLTRMLTFKFYMPKKATELKHLQCLEEELKPLEEALNLAPSKNFHLRPRDLISNINVIVLELKGSETTFMCEYADETATIVEFLNRWITFSQSTISTLTGGGGSGGGGSEPKSSDKTHTCPPCPAPELLGGPSVFLFPPKPKDTLMISRTPEVTCVVVDVSHEDPEVKFNWYVDGVEVHNAKTKPREEQYNSTYRVVSVLTVLHQDWLNGKEYKCKVSNKALPAPIEKTISKAKGQPREPQVYTLPPSREEMTKNQVSLTCLVKGFYPSDIAVEWESNGQPENNYKTTPPVLDSDGSFFLYSKLTVDKSRWQQGNVFSCSVMHEALHNHYTQKSLSLSPGK

SEQ ID NO: 207 - protein, 325 aa, Artificial Sequence
  Made in Lab - P1664 Activatable Proprotein construct
APTSSSTKKTQLQLEHLLLDLQMILNGINNYKNPKLTRMLTFKFYMPKKATELKHLQCLEEELKPLEEALNLAPSKNFHLRPRDLISNINVIVLELKGSETTFMCEYADETATIVEFLNRWITFSQSTISTLTGSGSENLYFQGGSGSELCDDDPPEIPHATFKAMAYKEGTMLNCECKRGFRRIKSGSLYMLCTGNSSHSSWDNQCQCTSSATRNTTKQVTPQPEEQKERKTTEMQSPMQPVDQASLPGHCREPPPWENEATERIYHFVVGQMVYYQCVQGYRALHRGPAESVCKMTHGKTRWTQPQLICTGEGGGGSHHHHHH

SEQ ID NO: 208 - protein, 556 aa, Artificial Sequence
  Made in Lab - P1665 Activatable Proprotein construct
EPKSSDKTHTCPPCPAPELLGGPSVFLFPPKPKDTLMISRTPEVTCVVVDVSHEDPEVKFNWYVDGVEVHNAKTKPREEQYNSTYRVVSVLTVLHQDWLNGKEYKCKVSNKALPAPIEKTISKAKGQPREPQVYTLPPSREEMTKNQVSLTCLVKGFYPSDIAVEWESNGQPENNYKTTPPVLDSDGSFFLYSKLTVDKSRWQQGNVFSCSVMHEALHNHYTQKSLSLSPGKGGGGSGGGGSAPTSSSTKKTQLQLEHLLLDLQMILNGINNYKNPKLTRMLTFKFYMPKKATELKHLQCLEEELKPLEEALNLAPSKNFHLRPRDLISNINVIVLELKGSETTFMCEYADETATIVEFLNRWITFSQSTISTLTGSGSENLYFQGGSGSELCDDDPPEIPHATFKAMAYKEGTMLNCECKRGFRRIKSGSLYMLCTGNSSHSSWDNQCQCTSSATRNTTKQVTPQPEEQKERKTTEMQSPMQPVDQASLPGHCREPPPWENEATERIYHFVVGQMVYYQCVQGYRALHRGPAESVCKMTHGKTRWTQPQLICTGE

SEQ ID NO: 209 - protein, 556 aa, Artificial Sequence
  Made in Lab - P1666 Activatable Proprotein construct
APTSSSTKKTQLQLEHLLLDLQMILNGINNYKNPKLTRMLTFKFYMPKKATELKHLQCLEEELKPLEEALNLAPSKNFHLRPRDLISNINVIVLELKGSETTFMCEYADETATIVEFLNRWITFSQSTISTLTGSGSENLYFQGGSGSELCDDDPPEIPHATFKAMAYKEGTMLNCECKRGFRRIKSGSLYMLCTGNSSHSSWDNQCQCTSSATRNTTKQVTPQPEEQKERKTTEMQSPMQPVDQASLPGHCREPPPWENEATERIYHFVVGQMVYYQCVQGYRALHRGPAESVCKMTHGKTRWTQPQLICTGEGGGGSGGGGSEPKSSDKTHTCPPCPAPELLGGPSVFLFPPKPKDTLMISRTPEVTCVVVDVSHEDPEVKFNWYVDGVEVHNAKTKPREEQYNSTYRVVSVLTVLHQDWLNGKEYKCKVSNKALPAPIEKTISKAKGQPREPQVYTLPPSREEMTKNQVSLTCLVKGFYPSDIAVEWESNGQPENNYKTTPPVLDSDGSFFLYSKLTVDKSRWQQGNVFSCSVMHEALHNHYTQKSLSLSPGK

SEQ ID NO: 210 - protein, 329 aa, Artificial Sequence
  Made in Lab - P1667 Activatable Proprotein construct
APTSSSTKKTQLQLEHLLLDLQMILNGINNYKNPKLTRMLTFKFYMPKKATELKHLQCLEEELKPLEEALNLAPSKNFHLRPRDLISNINVIVLELKGSETTFMCEYADETATIVEFLNRWITFSQSTISTLTGSGSGSENLYFQGGSGSGSELCDDDPPEIPHATFKAMAYKEGTMLNCECKRGFRRIKSGSLYMLCTGNSSHSSWDNQCQCTSSATRNTTKQVTPQPEEQKERKTTEMQSPMQPVDQASLPGHCREPPPWENEATERIYHFVVGQMVYYQCVQGYRALHRGPAESVCKMTHGKTRWTQPQLICTGEGGGGSHHHHHH

SEQ ID NO: 211 - protein, 560 aa, Artificial Sequence
  Made in Lab - P1668 Activatable Proprotein construct
EPKSSDKTHTCPPCPAPELLGGPSVFLFPPKPKDTLMISRTPEVTCVVVDVSHEDPEVKFNWYVDGVEVHNAKTKPREEQYNSTYRVVSVLTVLHQDWLNGKEYKCKVSNKALPAPIEKTISKAKGQPREPQVYTLPPSREEMTKNQVSLTCLVKGFYPSDIAVEWESNGQPENNYKTTPPVLDSDGSFFLYSKLTVDKSRWQQGNVFSCSVMHEALHNHYTQKSLSLSPGKGGGGSGGGGSAPTSSSTKKTQLQLEHLLLDLQMILNGINNYKNPKLTRMLTFKFYMPKKATELKHLQCLEEELKPLEEALNLAPSKNFHLRPRDLISNINVIVLELKGSETTFMCEYADETATIVEFLNRWITFSQSTISTLTGSGSGSENLYFQGGSGSGSELCDDDPPEIPHATFKAMAYKEGTMLNCECKRGFRRIKSGSLYMLCTGNSSHSSWDNQCQCTSSATRNTTKQVTPQPEEQKERKTTEMQSPMQPVDQASLPGHCREPPPWENEATERIYHFVVGQMVYYQCVQGYRALHRGPAESVCKMTHGKTRWTQPQLICTGE

SEQ ID NO: 212 - protein, 560 aa, Artificial Sequence
  Made in Lab - P1669 Activatable Proprotein construct
APTSSSTKKTQLQLEHLLLDLQMILNGINNYKNPKLTRMLTFKFYMPKKATELKHLQCLEEELKPLEEALNLAPSKNFHLRPRDLISNINVIVLELKGSETTFMCEYADETATIVEFLNRWITFSQSTISTLTGSGSGSENLYFQGGSGSGSELCDDDPPEIPHATFKAMAYKEGTMLNCECKRGFRRIKSGSLYMLCTGNSSHSSWDNQCQCTSSATRNTTKQVTPQPEEQKERKTTEMQSPMQPVDQASLPGHCREPPPWENEATERIYHFVVGQMVYYQCVQGYRALHRGPAESVCKMTHGKTRWTQPQLICTGEGGGGSGGGGSEPKSSDKTHTCPPCPAPELLGGPSVFLFPPKPKDTLMISRTPEVTCVVVDVSHEDPEVKFNWYVDGVEVHNAKTKPREEQYNSTYRVVSVLTVLHQDWLNGKEYKCKVSNKALPAPIEKTISKAKGQPREPQVYTLPPSREEMTKNQVSLTCLVKGFYPSDIAVEWESNGQPENNYKTTPPVLDSDGSFFLYSKLTVDKSRWQQGNVFSCSVMHEALHNHYTQKSLSLSPGK

SEQ ID NO: 213 - protein, 325 aa, Artificial Sequence
  Made in Lab - P1719 Activatable Proprotein construct
APASSSTKKTQLQLEHLLLDLQMILNGINNYKNPKLTRMLTFKFYMPKKATELKHLQCLECELKPLEEVLNLAQSKNFHLRPRDLISNINVIVLELKGSETTFMCEYADETATIVEFLNRWITFSQSIISTLTPLGLAGSGRSDNQGAELCDDDPPEIPHATFKAMAYKEGTMLNCECKRGFRRICSGSLYMLCTGNSSHSSWDNQCQCTSSATRNTTKQVTPQPEEQKERKTTEMQSPMQPVDQASLPGHCREPPPWENEATERIYHFVVGQMVYYQCVQGYRALHRGPAESVCKMTHGKTRWTQPQLICTGEGGGGSHHHHHH

SEQ ID NO: 214 - protein, 142 aa, Artificial Sequence
  Made in Lab - P1719 cleaved protein construct
APASSSTKKTQLQLEHLLLDLQMILNGINNYKNPKLTRMLTFKFYMPKKATELKHLQCLECELKPLEEVLNLAQSKNFHLRPRDLISNINVIVLELKGSETTFMCEYADETATIVEFLNRWITFSQSIISTLTPLGLAGSGR

SEQ ID NO: 215 - protein, 183 aa, Artificial Sequence
  Made in Lab - P1719 cleaved protein construct
SDNQGAELCDDDPPEIPHATFKAMAYKEGTMLNCECKRGFRRICSGSLYMLCTGNSSHSSWDNQCQCTSSATRNTTKQVTPQPEEQKERKTTEMQSPMQPVDQASLPGHCREPPPWENEATERIYHFVVGQMVYYQCVQGYRALHRGPAESVCKMTHGKTRWTQPQLICTGEGGGGSHHHHHH

SEQ ID NO: 216 - protein, 325 aa, Artificial Sequence; identical to SEQ ID NO: 213
  Made in Lab - P1719 cleaved protein construct

SEQ ID NO: 217 - protein, 142 aa, Artificial Sequence; identical to SEQ ID NO: 214
  Made in Lab - P1719 cleaved protein construct

SEQ ID NO: 218 - protein, 183 aa, Artificial Sequence; identical to SEQ ID NO: 215
  Made in Lab - P1719 cleaved protein construct

SEQ ID NO: 219 - protein, 136 aa, Artificial Sequence
  Made in Lab - P1719 cleaved protein construct
APASSSTKKTQLQLEHLLLDLQMILNGINNYKNPKLTRMLTFKFYMPKKATELKHLQCLECELKPLEEVLNLAQSKNFHLRPRDLISNINVIVLELKGSETTFMCEYADETATIVEFLNRWITFSQSIISTLTPLG

SEQ ID NO: 220 - protein, 189 aa, Artificial Sequence
  Made in Lab - P1719 cleaved protein construct
LAGSGRSDNQGAELCDDDPPEIPHATFKAMAYKEGTMLNCECKRGFRRICSGSLYMLCTGNSSHSSWDNQCQCTSSATRNTTKQVTPQPEEQKERKTTEMQSPMQPVDQASLPGHCREPPPWENEATERIYHFVVGQMVYYQCVQGYRALHRGPAESVCKMTHGKTRWTQPQLICTGEGGGGSHHHHHH

SEQ ID NO: 221 - protein, 325 aa, Artificial Sequence; identical to SEQ ID NO: 213
  Made in Lab - P1719 cleaved protein construct

SEQ ID NO: 222 - protein, 136 aa, Artificial Sequence; identical to SEQ ID NO: 219
  Made in Lab - P1719 cleaved protein construct

SEQ ID NO: 223 - protein, 189 aa, Artificial Sequence; identical to SEQ ID NO: 220
  Made in Lab - P1719 cleaved protein construct

SEQ ID NO: 224 - protein, 145 aa, Artificial Sequence
  Made in Lab - P1719 cleaved protein construct
APASSSTKKTQLQLEHLLLDLQMILNGINNYKNPKLTRMLTFKFYMPKKATELKHLQCLECELKPLEEVLNLAQSKNFHLRPRDLISNINVIVLELKGSETTFMCEYADETATIVEFLNRWITFSQSIISTLTPLGLAGSGRSDN

SEQ ID NO: 225 - protein, 180 aa, Artificial Sequence
  Made in Lab - P1719 cleaved protein construct
QGAELCDDDPPEIPHATFKAMAYKEGTMLNCECKRGFRRICSGSLYMLCTGNSSHSSWDNQCQCTSSATRNTTKQVTPQPEEQKERKTTEMQSPMQPVDQASLPGHCREPPPWENEATERIYHFVVGQMVYYQCVQGYRALHRGPAESVCKMTHGKTRWTQPQLICTGEGGGGSHHHHHH

SEQ ID NO: 226 - protein, 325 aa, Artificial Sequence; identical to SEQ ID NO: 213
  Made in Lab - P1719 cleaved protein construct

SEQ ID NO: 227 - protein, 145 aa, Artificial Sequence; identical to SEQ ID NO: 224
  Made in Lab - P1719 cleaved protein construct

SEQ ID NO: 228 - protein, 180 aa, Artificial Sequence; identical to SEQ ID NO: 225
  Made in Lab - P1719 cleaved protein construct

SEQ ID NO: 229 - protein, 556 aa, Artificial Sequence
  Made in Lab - P1720 Activatable Proprotein construct
EPKSSDKTHTCPPCPAPELLGGPSVFLFPPKPKDTLMISRTPEVTCVVVDVSHEDPEVKFNWYVDGVEVHNAKTKPREEQYNSTYRVVSVLTVLHQDWLNGKEYKCKVSNKALPAPIEKTISKAKGQPREPQVYTLPPSREEMTKNQVSLTCLVKGFYPSDIAVEWESNGQPENNYKTTPPVLDSDGSFFLYSKLTVDKSRWQQGNVFSCSVMHEALHNHYTQKSLSLSPGGGGGSGGGGSAPASSSTKKTQLQLEHLLLDLQMILNGINNYKNPKLTRMLTFKFYMPKKATELKHLQCLECELKPLEEVLNLAQSKNFHLRPRDLISNINVIVLELKGSETTFMCEYADETATIVEFLNRWITFSQSIISTLTGPLGLAGSGRSDNQGAELCDDDPPEIPHATFKAMAYKEGTMLNCECKRGFRRICSGSLYMLCTGNSSHSSWDNQCQCTSSATRNTTKQVTPQPEEQKERKTTEMQSPMQPVDQASLPGHCREPPPWENEATERIYHFVVGQMVYYQCVQGYRALHRGPAESVCKMTHGKTRWTQPQLICTGE

SEQ ID NO: 230 - protein, 556 aa, Artificial Sequence
  Made in Lab - P1721 Activatable Proprotein construct
APASSSTKKTQLQLEHLLLDLQMILNGINNYKNPKLTRMLTFKFYMPKKATELKHLQCLECELKPLEEVLNLAQSKNFHLRPRDLISNINVIVLELKGSETTFMCEYADETATIVEFLNRWITFSQSIISTLTPLGLAGSGRSDNQGAELCDDDPPEIPHATFKAMAYKEGTMLNCECKRGFRRICSGSLYMLCTGNSSHSSWDNQCQCTSSATRNTTKQVTPQPEEQKERKTTEMQSPMQPVDQASLPGHCREPPPWENEATERIYHFVVGQMVYYQCVQGYRALHRGPAESVCKMTHGKTRWTQPQLICTGEGGGGSGGGGSEPKSSDKTHTCPPCPAPELLGGPSVFLFPPKPKDTLMISRTPEVTCVVVDVSHEDPEVKFNWYVDGVEVHNAKTKPREEQYNSTYRVVSVLTVLHQDWLNGKEYKCKVSNKALPAPIEKTISKAKGQPREPQVYTLPPSREEMTKNQVSLTCLVKGFYPSDIAVEWESNGQPENNYKTTPPVLDSDGSFFLYSKLTVDKSRWQQGNVFSCSVMHEALHNHYTQKSLSLSPGK

SEQ ID NO: 231 - protein, 326 aa, Artificial Sequence
  Made in Lab - P1722 Activatable Proprotein construct
APASSSTKKTQLQLEHLLLDLQMILNGINNYKNPKLTRMLTFKFYMPKKATELKHLQCLECELKPLEEVLNLAQSKNFHLRPRDLISNINVIVLELKGSETTFMCEYADETATIVEFLNRWITFSQSIISTLTGPLGLAGSGRSDNQGAELCDDDPPEIPHATFKAMAYKEGTMLNCECKRGFRRICSGSLYMLCTGNSSHSSWDNQCQCTSSATRNTTKQVTPQPEEQKERKTTEMQSPMQPVDQASLPGHCREPPPWENEATERIYHFVVGQMVYYQCVQGYRALHRGPAESVCKMTHGKTRWTQPQLICTGEGGGGSHHHHHH

SEQ ID NO: 232 - protein, 557 aa, Artificial Sequence
  Made in Lab - P1723 Activatable Proprotein construct
EPKSSDKTHTCPPCPAPELLGGPSVFLFPPKPKDTLMISRTPEVTCVVVDVSHEDPEVKFNWYVDGVEVHNAKTKPREEQYNSTYRVVSVLTVLHQDWLNGKEYKCKVSNKALPAPIEKTISKAKGQPREPQVYTLPPSREEMTKNQVSLTCLVKGFYPSDIAVEWESNGQPENNYKTTPPVLDSDGSFFLYSKLTVDKSRWQQGNVFSCSVMHEALHNHYTQKSLSLSPGGGGGSGGGGSAPASSSTKKTQLQLEHLLLDLQMILNGINNYKNPKLTRMLTFKFYMPKKATELKHLQCLECELKPLEEVLNLAQSKNFHLRPRDLISNINVIVLELKGSETTFMCEYADETATIVEFLNRWITFSQSIISTLTGGPLGLAGSGRSDNQGAELCDDDPPEIPHATFKAMAYKEGTMLNCECKRGFRRICSGSLYMLCTGNSSHSSWDNQCQCTSSATRNTTKQVTPQPEEQKERKTTEMQSPMQPVDQASLPGHCREPPPWENEATERIYHFVVGQMVYYQCVQGYRALHRGPAESVCKMTHGKTRWTQPQLICTGE

SEQ ID NO: 233 - protein, 557 aa, Artificial Sequence
  Made in Lab - P1724 Activatable Proprotein construct
APASSSTKKTQLQLEHLLLDLQMILNGINNYKNPKLTRMLTFKFYMPKKATELKHLQCLECELKPLEEVLNLAQSKNFHLRPRDLISNINVIVLELKGSETTFMCEYADETATIVEFLNRWITFSQSIISTLTGPLGLAGSGRSDNQGAELCDDDPPEIPHATFKAMAYKEGTMLNCECKRGFRRICSGSLYMLCTGNSSHSSWDNQCQCTSSATRNTTKQVTPQPEEQKERKTTEMQSPMQPVDQASLPGHCREPPPWENEATERIYHFVVGQMVYYQCVQGYRALHRGPAESVCKMTHGKTRWTQPQLICTGEGGGGSGGGGSEPKSSDKTHTCPPCPAPELLGGPSVFLFPPKPKDTLMISRTPEVTCVVVDVSHEDPEVKFNWYVDGVEVHNAKTKPREEQYNSTYRVVSVLTVLHQDWLNGKEYKCKVSNKALPAPIEKTISKAKGQPREPQVYTLPPSREEMTKNQVSLTCLVKGFYPSDIAVEWESNGQPENNYKTTPPVLDSDGSFFLYSKLTVDKSRWQQGNVFSCSVMHEALHNHYTQKSLSLSPGK

SEQ ID NO: 234 - protein, 555 aa, Artificial Sequence
  Made in Lab - P1725 Activatable Proprotein construct
EPKSSDKTHTCPPCPAPELLGGPSVFLFPPKPKDTLMISRTPEVTCVVVDVSHEDPEVKFNWYVDGVEVHNAKTKPREEQYNSTYRVVSVLTVLHQDWLNGKEYKCKVSNKALPAPIEKTISKAKGQPREPQVYTLPPSREEMTKNQVSLTCLVKGFYPSDIAVEWESNGQPENNYKTTPPVLDSDGSFFLYSKLTVDKSRWQQGNVFSCSVMHEALHNHYTQKSLSLSPGGGGGSGGGGSELCDDDPPEIPHATFKAMAYKEGTMLNCECKRGFRRIKSGSLYMLCTGNSSHSSWDNQCQCTSSATRNTTKQVTPQPEEQKERKTTEMQSPMQPVDQASLPGHCREPPPWENEATERIYHFVVGQMVYYQCVQGYRALHRGPAESVCKMTHGKTRWTQPQLICTGEPLGLAGSGRSDNQGAAPTSSSTKKTQLQLEHLLLDLQMILNGINNYKNPKLTRMLTFKFYMPKKATELKHLQCLEEELKPLEEVLNLAQSKNFHLRPRDLISNINVIVLELKGSETTFMCEYADETATIVEFLNRWITFSQSIISTLT

SEQ ID NO: 235 - protein, 555 aa, Artificial Sequence
  Made in Lab - P1726 Activatable Proprotein construct
EPKSSDKTHTCPPCPAPELLGGPSVFLFPPKPKDTLMISRTPEVTCVVVDVSHEDPEVKFNWYVDGVEVHNAKTKPREEQYNSTYRVVSVLTVLHQDWLNGKEYKCKVSNKALPAPIEKTISKAKGQPREPQVYTLPPSREEMTKNQVSLTCLVKGFYPSDIAVEWESNGQPENNYKTTPPVLDSDGSFFLYSKLTVDKSRWQQGNVFSCSVMHEALHNHYTQKSLSLSPGGGGGSGGGGSELCDDDPPEIPHATFKAMAYKEGTMLNCECKRGFRRIKSGSLYMLCTGNSSHSSWDNQCQCTSSATRNTTKQVTPQPEEQKERKTTEMQSPMQPVDQASLPGHCREPPPWENEATERIYHFVVGQMVYYQCVQGYRALHRGPAESVCKMTHGKTRWTQPQLICTGEPLGLAGSGRSDNQGAAPASSSTKKTQLQLEHLLLDLQMILNGINNYKNPKLTRMLTFKFYMPKKATELKHLQCLEEELKPLEEVLNLAQSKNFHLRPRDLISNINVIVLELKGSETTFMCEYADETATIVEFLNRWITFSQSIISTLT

SEQ ID NO: 236 - protein, 555 aa, Artificial Sequence
  Made in Lab - P1727 Activatable Proprotein construct
EPKSSDKTHTCPPCPAPELLGGPSVFLFPPKPKDTLMISRTPEVTCVVVDVSHEDPEVKFNWYVDGVEVHNAKTKPREEQYNSTYRVVSVLTVLHQDWLNGKEYKCKVSNKALPAPIEKTISKAKGQPREPQVYTLPPSREEMTKNQVSLTCLVKGFYPSDIAVEWESNGQPENNYKTTPPVLDSDGSFFLYSKLTVDKSRWQQGNVFSCSVMHEALHNHYTQKSLSLSPGGGGGSGGGGSELCCDDPPEIPHATFKAMAYKEGTMLNCECKRGFRRIKSGSLYMLCTGNSSHSSWDNQCQCTSSATRNTTKQVTPQPEEQKERKTTEMQSPMQPVDQASLPGHCREPPPWENEATERIYHFVVGQMVYYQCVQGYRALHRGPAESVCKMTHGKTRWTQPQLICTGEPLGLAGSGRSDNQGAAPASSSTKKTQLQLEHLLLDLQMILNGINNYKNPCLTRMLTFKFYMPKKATELKHLQCLEEELKPLEEVLNLAQSKNFHLRPRDLISNINVIVLELKGSETTFMCEYADETATIVEFLNRWITFSQSIISTLT

SEQ ID NO: 237 - protein, 555 aa, Artificial Sequence
  Made in Lab - P1728 Activatable Proprotein construct
EPKSSDKTHTCPPCPAPELLGGPSVFLFPPKPKDTLMISRTPEVTCVVVDVSHEDPEVKFNWYVDGVEVHNAKTKPREEQYNSTYRVVSVLTVLHQDWLNGKEYKCKVSNKALPAPIEKTISKAKGQPREPQVYTLPPSREEMTKNQVSLTCLVKGFYPSDIAVEWESNGQPENNYKTTPPVLDSDGSFFLYSKLTVDKSRWQQGNVFSCSVMHEALHNHYTQKSLSLSPGGGGGSGGGGSELCDDDPPEIPHATFKAMAYKEGTMLNCECKRGFRRIKSGSLYMLCTGNSSHSSWDNQCQCTSSATRNTTKQVTPQPEEQKERKTTEMQSPMQPVDQASLPGHCREPPPWENEATERIYCFVVGQMVYYQCVQGYRALHRGPAESVCKMTHGKTRWTQPQLICTGEPLGLAGSGRSDNQGAAPASSSTKKTQLQLEHLLLDLQMILNGINNYKNPKLTCMLTFKFYMPKKATELKHLQCLEEELKPLEEVLNLAQSKNFHLRPRDLISNINVIVLELKGSETTFMCEYADETATIVEFLNRWITFSQSIISTLT

SEQ ID NO: 238 - protein, 555 aa, Artificial Sequence
  Made in Lab - P1729 Activatable Proprotein construct
EPKSSDKTHTCPPCPAPELLGGPSVFLFPPKPKDTLMISRTPEVTCVVVDVSHEDPEVKFNWYVDGVEVHNAKTKPREEQYNSTYRVVSVLTVLHQDWLNGKEYKCKVSNKALPAPIEKTISKAKGQPREPQVYTLPPSREEMTKNQVSLTCLVKGFYPSDIAVEWESNGQPENNYKTTPPVLDSDGSFFLYSKLTVDKSRWQQGNVFSCSVMHEALHNHYTQKSLSLSPGGGGGSGGGGSELCDDDPPEIPHATFKAMAYKEGTMLNCECKRGFRRICSGSLYMLCTGNSSHSSWDNQCQCTSSATRNTTKQVTPQPEEQKERKTTEMQSPMQPVDQASLPGHCREPPPWENEATERIYHFVVGQMVYYQCVQGYRALHRGPAESVCKMTHGKTRWTQPQLICTGEPLGLAGSGRSDNQGAAPASSSTKKTQLQLEHLLLDLQMILNGINNYKNPKLTRMLTFKFYMPKKATELKHLQCLECELKPLEEVLNLAQSKNFHLRPRDLISNINVIVLELKGSETTFMCEYADETATIVEFLNRWITFSQSIISTLT

SEQ ID NO: 239 - protein, 555 aa, Artificial Sequence
  Made in Lab - P1730 Activatable Proprotein construct
EPKSSDKTHTCPPCPAPELLGGPSVFLFPPKPKDTLMISRTPEVTCVVVDVSHEDPEVKFNWYVDGVEVHNAKTKPREEQYNSTYRVVSVLTVLHQDWLNGKEYKCKVSNKALPAPIEKTISKAKGQPREPQVYTLPPSREEMTKNQVSLTCLVKGFYPSDIAVEWESNGQPENNYKTTPPVLDSDGSFFLYSKLTVDKSRWQQGNVFSCSVMHEALHNHYTQKSLSLSPGGGGGSGGGGSELCDDDPPEIPHATFKAMAYKEGTMLNCECKRGFRRIKCGSLYMLCTGNSSHSSWDNQCQCTSSATRNTTKQVTPQPEEQKERKTTEMQSPMQPVDQASLPGHCREPPPWENEATERIYHFVVGQMVYYQCVQGYRALHRGPAESVCKMTHGKTRWTQPQLICTGEPLGLAGSGRSDNQGAAPASSSTKKTQLQLEHLLLDLQMILNGINNYKNPKLTRMLTFKFYMPKKATELKHLQCLECELKPLEEVLNLAQSKNFHLRPRDLISNINVIVLELKGSETTFMCEYADETATIVEFLNRWITFSQSIISTLT

SEQ ID NO: 240 - protein, 325 aa, Artificial Sequence
  Made in Lab - P1773 Activatable Proprotein construct
ELCDDDPPEIPHATFKAMAYKEGTMLNCECKRGFRRIKSGSLYMLCTGNSSHSSWDNQCQCTSSATRNTTKQVTPQPEEQKERKTTEMQSPMQPVDQASLPGHCREPPPWENEATERIYHFVVGQMVYYQCVQGYRALHRGPAESVCKMTHGKTRWTQPQLICTGEGSGSENLYFQGGSGSAPTSSSTKKTQLQLEHLLLDLQMILNGINNYKNPKLTRMLTFKFYMPKKATELKHLQCLEEELKPLEEALNLAPSKNFHLRPRDLISNINVIVLELKGSETTFMCEYADETATIVEFLNRWITFSQSTISTLTGGGGSHHHHHH

SEQ ID NO: 241 - protein, 556 aa, Artificial Sequence
  Made in Lab - P1774 Activatable Proprotein construct
EPKSSDKTHTCPPCPAPELLGGPSVFLFPPKPKDTLMISRTPEVTCVVVDVSHEDPEVKFNWYVDGVEVHNAKTKPREEQYNSTYRVVSVLTVLHQDWLNGKEYKCKVSNKALPAPIEKTISKAKGQPREPQVYTLPPSREEMTKNQVSLTCLVKGFYPSDIAVEWESNGQPENNYKTTPPVLDSDGSFFLYSKLTVDKSRWQQGNVFSCSVMHEALHNHYTQKSLSLSPGKGGGGSGGGGSELCDDDPPEIPHATFKAMAYKEGTMLNCECKRGFRRIKSGSLYMLCTGNSSHSSWDNQCQCTSSATRNTTKQVTPQPEEQKERKTTEMQSPMQPVDQASLPGHCREPPPWENEATERIYHFVVGQMVYYQCVQGYRALHRGPAESVCKMTHGKTRWTQPQLICTGEGSGSENLYFQGGSGSAPTSSSTKKTQLQLEHLLLDLQMILNGINNYKNPKLTRMLTFKFYMPKKATELKHLQCLEEELKPLEEALNLAPSKNFHLRPRDLISNINVIVLELKGSETTFMCEYADETATIVEFLNRWITFSQSTISTLT

SEQ ID NO: 242 - protein, 556 aa, Artificial Sequence
  Made in Lab - P1775 Activatable Proprotein construct
ELCDDDPPEIPHATFKAMAYKEGTMLNCECKRGFRRIKSGSLYMLCTGNSSHSSWDNQCQCTSSATRNTTKQVTPQPEEQKERKTTEMQSPMQPVDQASLPGHCREPPPWENEATERIYHFVVGQMVYYQCVQGYRALHRGPAESVCKMTHGKTRWTQPQLICTGEGSGSENLYFQGGSGSAPTSSSTKKTQLQLEHLLLDLQMILNGINNYKNPKLTRMLTFKFYMPKKATELKHLQCLEEELKPLEEALNLAPSKNFHLRPRDLISNINVIVLELKGSETTFMCEYADETATIVEFLNRWITFSQSTISTLTGGGGSGGGGSEPKSSDKTHTCPPCPAPELLGGPSVFLFPPKPKDTLMISRTPEVTCVVVDVSHEDPEVKFNWYVDGVEVHNAKTKPREEQYNSTYRVVSVLTVLHQDWLNGKEYKCKVSNKALPAPIEKTISKAKGQPREPQVYTLPPSREEMTKNQVSLTCLVKGFYPSDIAVEWESNGQPENNYKTTPPVLDSDGSFFLYSKLTVDKSRWQQGNVFSCSVMHEALHNHYTQKSLSLSPGK

SEQ ID NO: 243 - protein, 329 aa, Artificial Sequence
  Made in Lab - P1776 Activatable Proprotein construct
ELCDDDPPEIPHATFKAMAYKEGTMLNCECKRGFRRIKSGSLYMLCTGNSSHSSWDNQCQCTSSATRNTTKQVTPQPEEQKERKTTEMQSPMQPVDQASLPGHCREPPPWENEATERIYHFVVGQMVYYQCVQGYRALHRGPAESVCKMTHGKTRWTQPQLICTGEGSGSGSENLYFQGGSGSGSAPTSSSTKKTQLQLEHLLLDLQMILNGINNYKNPKLTRMLTFKFYMPKKATELKHLQCLEEELKPLEEALNLAPSKNFHLRPRDLISNINVIVLELKGSETTFMCEYADETATIVEFLNRWITFSQSTISTLTGGGGSHHHHHH

SEQ ID NO: 244 - protein, 560 aa, Artificial Sequence
  Made in Lab - P1777 Activatable Proprotein construct
EPKSSDKTHTCPPCPAPELLGGPSVFLFPPKPKDTLMISRTPEVTCVVVDVSHEDPEVKFNWYVDGVEVHNAKTKPREEQYNSTYRVVSVLTVLHQDWLNGKEYKCKVSNKALPAPIEKTISKAKGQPREPQVYTLPPSREEMTKNQVSLTCLVKGFYPSDIAVEWESNGQPENNYKTTPPVLDSDGSFFLYSKLTVDKSRWQQGNVFSCSVMHEALHNHYTQKSLSLSPGKGGGGSGGGGSELCDDDPPEIPHATFKAMAYKEGTMLNCECKRGFRRIKSGSLYMLCTGNSSHSSWDNQCQCTSSATRNTTKQVTPQPEEQKERKTTEMQSPMQPVDQASLPGHCREPPPWENEATERIYHFVVGQMVYYQCVQGYRALHRGPAESVCKMTHGKTRWTQPQLICTGEGSGSGSENLYFQGGSGSGSAPTSSSTKKTQLQLEHLLLDLQMILNGINNYKNPKLTRMLTFKFYMPKKATELKHLQCLEEELKPLEEALNLAPSKNFHLRPRDLISNINVIVLELKGSETTFMCEYADETATIVEFLNRWITFSQSTISTLT

SEQ ID NO: 245 - protein, 560 aa, Artificial Sequence
  Made in Lab - P1778 Activatable Proprotein construct
ELCDDDPPEIPHATFKAMAYKEGTMLNCECKRGFRRIKSGSLYMLCTGNSSHSSWDNQCQCTSSATRNTTKQVTPQPEEQKERKTTEMQSPMQPVDQASLPGHCREPPPWENEATERIYHFVVGQMVYYQCVQGYRALHRGPAESVCKMTHGKTRWTQPQLICTGEGSGSGSENLYFQGGSGSGSAPTSSSTKKTQLQLEHLLLDLQMILNGINNYKNPKLTRMLTFKFYMPKKATELKHLQCLEEELKPLEEALNLAPSKNFHLRPRDLISNINVIVLELKGSETTFMCEYADETATIVEFLNRWITFSQSTISTLTGGGGSGGGGSEPKSSDKTHTCPPCPAPELLGGPSVFLFPPKPKDTLMISRTPEVTCVVVDVSHEDPEVKFNWYVDGVEVHNAKTKPREEQYNSTYRVVSVLTVLHQDWLNGKEYKCKVSNKALPAPIEKTISKAKGQPREPQVYTLPPSREEMTKNQVSLTCLVKGFYPSDIAVEWESNGQPENNYKTTPPVLDSDGSFFLYSKLTVDKSRWQQGNVFSCSVMHEALHNHYTQKSLSLSPGK

SEQ ID NO: 246 - protein, 560 aa, Artificial Sequence
  Made in Lab - P1779 Activatable Proprotein construct
APASSSTKKTQLQLEHLLLDLQMILNGINNYKNPKLTRMLTFKFYMPKKATELKHLQCLEEELKPLEEALNLAPSKNFHLRPRDLISNINVIVLELKGSETTFMCEYADETATIVEFLNRWITFSQSTISTLTGGSPLGLAGSGRSDNHGGAELCDDDPPEIPHATFKAMAYKEGTMLNCECKRGFRRIKSGSLYMLCTGNSSHSSWDNQCQCTSSATRNTTKQVTPQPEEQKERKTTEMQSPMQPVDQASLPGHCREPPPWENEATERIYHFVVGQMVYYQCVQGYRALHRGPAESVCKMTHGKTRWTQPQLICTGEGGGGSGGGGSEPKSSDKTHTCPPCPAPEAAGGPSVFLFPPKPKDTLMISRTPEVTCVVVDVSHEDPEVKFNWYVDGVEVHNAKTKPREEQYNSTYRVVSVLTVLHQDWLNGKEYKCKVSNKALAAPIEKTISKAKGQPREPQVYTLPPSRDELTKNQVSLTCLVKGFYPSDIAVEWESNGQPENNYKTTPPVLDSDGSFFLYSKLTVDKSRWQQGNVFSCSVMHEALHNHYTQKSLSLSPGK

SEQ ID NO: 247 - protein, 145 aa, Artificial Sequence
  Made in Lab - P1779 cleaved protein construct
APASSSTKKTQLQLEHLLLDLQMILNGINNYKNPKLTRMLTFKFYMPKKATELKHLQCLEEELKPLEEALNLAPSKNFHLRPRDLISNINVIVLELKGSETTFMCEYADETATIVEFLNRWITFSQSTISTLTGGSPLGLAGSGR

SEQ ID NO: 248 - protein, 415 aa, Artificial Sequence
  Made in Lab - P1779 cleaved protein construct
SDNHGGAELCDDDPPEIPHATFKAMAYKEGTMLNCECKRGFRRIKSGSLYMLCTGNSSHSSWDNQCQCTSSATRNTTKQVTPQPEEQKERKTTEMQSPMQPVDQASLPGHCREPPPWENEATERIYHFVVGQMVYYQCVQGYRALHRGPAESVCKMTHGKTRWTQPQLICTGEGGGGSGGGGSEPKSSDKTHTCPPCPAPEAAGGPSVFLFPPKPKDTLMISRTPEVTCVVVDVSHEDPEVKFNWYVDGVEVHNAKTKPREEQYNSTYRVVSVLTVLHQDWLNGKEYKCKVSNKALAAPIEKTISKAKGQPREPQVYTLPPSRDELTKNQVSLTCLVKGFYPSDIAVEWESNGQPENNYKTTPPVLDSDGSFFLYSKLTVDKSRWQQGNVFSCSVMHEALHNHYTQKSLSLSPGK

SEQ ID NO: 249 - protein, 560 aa, Artificial Sequence; identical to SEQ ID NO: 246
  Made in Lab - P1779 cleaved protein construct

SEQ ID NO: 250 - protein, 145 aa, Artificial Sequence; identical to SEQ ID NO: 247
  Made in Lab - P1779 cleaved protein construct

SEQ ID NO: 251 - protein, 415 aa, Artificial Sequence; identical to SEQ ID NO: 248
  Made in Lab - P1779 cleaved protein construct

SEQ ID NO: 252 - protein, 139 aa, Artificial Sequence
  Made in Lab - P1779 cleaved protein construct
APASSSTKKTQLQLEHLLLDLQMILNGINNYKNPKLTRMLTFKFYMPKKATELKHLQCLEEELKPLEEALNLAPSKNFHLRPRDLISNINVIVLELKGSETTFMCEYADETATIVEFLNRWITFSQSTISTLTGGSPLG

SEQ ID NO: 253 - protein, 421 aa, Artificial Sequence
  Made in Lab - P1779 cleaved protein construct
LAGSGRSDNHGGAELCDDDPPEIPHATFKAMAYKEGTMLNCECKRGFRRIKSGSLYMLCTGNSSHSSWDNQCQCTSSATRNTTKQVTPQPEEQKERKTTEMQSPMQPVDQASLPGHCREPPPWENEATERIYHFVVGQMVYYQCVQGYRALHRGPAESVCKMTHGKTRWTQPQLICTGEGGGGSGGGGSEPKSSDKTHTCPPCPAPEAAGGPSVFLFPPKPKDTLMISRTPEVTCVVVDVSHEDPEVKFNWYVDGVEVHNAKTKPREEQYNSTYRVVSVLTVLHQDWLNGKEYKCKVSNKALAAPIEKTISKAKGQPREPQVYTLPPSRDELTKNQVSLTCLVKGFYPSDIAVEWESNGQPENNYKTTPPVLDSDGSFFLYSKLTVDKSRWQQGNVFSCSVMHEALHNHYTQKSLSLSPGK

SEQ ID NO: 254 - protein, 560 aa, Artificial Sequence; identical to SEQ ID NO: 246
  Made in Lab - P1779 cleaved protein construct

SEQ ID NO: 255 - protein, 139 aa, Artificial Sequence; identical to SEQ ID NO: 252
  Made in Lab - P1779 cleaved protein construct

SEQ ID NO: 256 - protein, 421 aa, Artificial Sequence; identical to SEQ ID NO: 253
  Made in Lab - P1779 cleaved protein construct

SEQ ID NO: 257 - protein, 148 aa, Artificial Sequence
  Made in Lab - P1779 cleaved protein construct
APASSSTKKTQLQLEHLLLDLQMILNGINNYKNPKLTRMLTFKFYMPKKATELKHLQCLEEELKPLEEALNLAPSKNFHLRPRDLISNINVIVLELKGSETTFMCEYADETATIVEFLNRWITFSQSTISTLTGGSPLGLAGSGRSDN

SEQ ID NO: 258 - protein, 412 aa, Artificial Sequence
  Made in Lab - P1779 cleaved protein construct
HGGAELCDDDPPEIPHATFKAMAYKEGTMLNCECKRGFRRIKSGSLYMLCTGNSSHSSWDNQCQCTSSATRNTTKQVTPQPEEQKERKTTEMQSPMQPVDQASLPGHCREPPPWENEATERIYHFVVGQMVYYQCVQGYRALHRGPAESVCKMTHGKTRWTQPQLICTGEGGGGSGGGGSEPKSSDKTHTCPPCPAPEAAGGPSVFLFPPKPKDTLMISRTPEVTCVVVDVSHEDPEVKFNWYVDGVEVHNAKTKPREEQYNSTYRVVSVLTVLHQDWLNGKEYKCKVSNKALAAPIEKTISKAKGQPREPQVYTLPPSRDELTKNQVSLTCLVKGFYPSDIAVEWESNGQPENNYKTTPPVLDSDGSFFLYSKLTVDKSRWQQGNVFSCSVMHEALHNHYTQKSLSLSPGK

SEQ ID NO: 259 - protein, 560 aa, Artificial Sequence; identical to SEQ ID NO: 246
  Made in Lab - P1779 cleaved protein construct

SEQ ID NO: 260 - protein, 148 aa, Artificial Sequence; identical to SEQ ID NO: 257
  Made in Lab - P1779 cleaved protein construct

SEQ ID NO: 261 - protein, 412 aa, Artificial Sequence; identical to SEQ ID NO: 258
  Made in Lab - P1779 cleaved protein construct

SEQ ID NO: 262 - protein, 558 aa, Artificial Sequence
  Made in Lab - P1780 Activatable Proprotein construct
APASSSTKKTQLQLEHLLLDLQMILNGINNYKNPKLTRMLTFKFYMPKKATELKHLQCLEEELKPLEEALNLAPSKNFHLRPRDLISNINVIVLELKGSETTFMCEYADETATIVEFLNRWITFSQSTISTLTGGSPLGLAGSGRSDNHGGAELCDDDPPEIPHATFKAMAYKEGTMLNCECKRGFRRIKSGSLYMLCTGNSSHSSWDNQCQCTSSATRNTTKQVTPQPEEQKERKTTEMQSPMQPVDQASLPGHCREPPPWENEATERIYHFVVGQMVYYQCVQGYRALHRGPAESVCKMTHGKTRWTQPQLICTGEGGSGGGGSEPKSSDKTHTCPPCPAPEAAGGPSVFLFPPKPKDTLMISRTPEVTCVVVDVSHEDPEVKFNWYVDGVEVHNAKTKPREEQYNSTYRVVSVLTVLHQDWLNGKEYKCKVSNKALAAPIEKTISKAKGQPREPQVYTLPPSRDELTKNQVSLTCLVKGFYPSDIAVEWESNGQPENNYKTTPPVLDSDGSFFLYSKLTVDKSRWQQGNVFSCSVMHEALHNHYTQKSLSLSPGK

SEQ ID NO: 263 - protein, 556 aa, Artificial Sequence
  Made in Lab - P1781 Activatable Proprotein construct
APASSSTKKTQLQLEHLLLDLQMILNGINNYKNPKLTRMLTFKFYMPKKATELKHLQCLEEELKPLEEALNLAPSKNFHLRPRDLISNINVIVLELKGSETTFMCEYADETATIVEFLNRWITFSQSTISTLTGGSPLGLAGSGRSDNHGGAELCDDDPPEIPHATFKAMAYKEGTMLNCECKRGFRRIKSGSLYMLCTGNSSHSSWDNQCQCTSSATRNTTKQVTPQPEEQKERKTTEMQSPMQPVDQASLPGHCREPPPWENEATERIYHFVVGQMVYYQCVQGYRALHRGPAESVCKMTHGKTRWTQPQLICTGESGGGGSEPKSSDKTHTCPPCPAPEAAGGPSVFLFPPKPKDTLMISRTPEVTCVVVDVSHEDPEVKFNWYVDGVEVHNAKTKPREEQYNSTYRVVSVLTVLHQDWLNGKEYKCKVSNKALAAPIEKTISKAKGQPREPQVYTLPPSRDELTKNQVSLTCLVKGFYPSDIAVEWESNGQPENNYKTTPPVLDSDGSFFLYSKLTVDKSRWQQGNVFSCSVMHEALHNHYTQKSLSLSPGK

SEQ ID NO: 264 - protein, 554 aa, Artificial Sequence
  Made in Lab - P1782 Activatable Proprotein construct
APASSSTKKTQLQLEHLLLDLQMILNGINNYKNPKLTRMLTFKFYMPKKATELKHLQCLEEELKPLEEALNLAPSKNFHLRPRDLISNINVIVLELKGSETTFMCEYADETATIVEFLNRWITFSQSTISTLTGGSPLGLAGSGRSDNHGGAELCDDDPPEIPHATFKAMAYKEGTMLNCECKRGFRRIKSGSLYMLCTGNSSHSSWDNQCQCTSSATRNTTKQVTPQPEEQKERKTTEMQSPMQPVDQASLPGHCREPPPWENEATERIYHFVVGQMVYYQCVQGYRALHRGPAESVCKMTHGKTRWTQPQLICTGEGGGSEPKSSDKTHTCPPCPAPEAAGGPSVFLFPPKPKDTLMISRTPEVTCVVVDVSHEDPEVKFNWYVDGVEVHNAKTKPREEQYNSTYRVVSVLTVLHQDWLNGKEYKCKVSNKALAAPIEKTISKAKGQPREPQVYTLPPSRDELTKNQVSLTCLVKGFYPSDIAVEWESNGQPENNYKTTPPVLDSDGSFFLYSKLTVDKSRWQQGNVFSCSVMHEALHNHYTQKSLSLSPGK

SEQ ID NO: 265 - protein, 560 aa, Artificial Sequence
  Made in Lab - P1783 Activatable Proprotein construct
APASSSTKKTQLQLEHLLLDLQMILNGINNYKNPKLTRMLTFKFYMPKKATELKHLQCLEEELKPLEEALNLAPSKNFHLRPRDLISNINVIVLELKGSETTFMCEYADETATIVEFLNRWITFSQSTISTLTGGSPLGLAGSGRSDNQGGAELCDDDPPEIPHATFKAMAYKEGTMLNCECKRGFRRIKSGSLYMLCTGNSSHSSWDNQCQCTSSATRNTTKQVTPQPEEQKERKTTEMQSPMQPVDQASLPGHCREPPPWENEATERIYHFVVGQMVYYQCVQGYRALHRGPAESVCKMTHGKTRWTQPQLICTGEGGGGSGGGGSEPKSSDKTHTCPPCPAPEAAGGPSVFLFPPKPKDTLMISRTPEVTCVVVDVSHEDPEVKFNWYVDGVEVHNAKTKPREEQYNSTYRVVSVLTVLHQDWLNGKEYKCKVSNKALAAPIEKTISKAKGQPREPQVYTLPPSRDELTKNQVSLTCLVKGFYPSDIAVEWESNGQPENNYKTTPPVLDSDGSFFLYSKLTVDKSRWQQGNVFSCSVMHEALHNHYTQKSLSLSPGK

SEQ ID NO: 266 - protein, 560 aa, Artificial Sequence
  Made in Lab - P1784 Activatable Proprotein construct
APASSSTKKTQLQLEHLLLDLQMILNGINNYKNPKLTRMLTFKFYMPKKATELKHLQCLEEELKPLEEALNLAPSKNFHLRPRDLISNINVIVLELKGSETTFMCEYADETATIVEFLNRWITFSQSTISTLTGGSPLGLAGSGRSDNRGGAELCDDDPPEIPHATFKAMAYKEGTMLNCECKRGFRRIKSGSLYMLCTGNSSHSSWDNQCQCTSSATRNTTKQVTPQPEEQKERKTTEMQSPMQPVDQASLPGHCREPPPWENEATERIYHFVVGQMVYYQCVQGYRALHRGPAESVCKMTHGKTRWTQPQLICTGEGGGGSGGGGSEPKSSDKTHTCPPCPAPEAAGGPSVFLFPPKPKDTLMISRTPEVTCVVVDVSHEDPEVKFNWYVDGVEVHNAKTKPREEQYNSTYRVVSVLTVLHQDWLNGKEYKCKVSNKALAAPIEKTISKAKGQPREPQVYTLPPSRDELTKNQVSLTCLVKGFYPSDIAVEWESNGQPENNYKTTPPVLDSDGSFFLYSKLTVDKSRWQQGNVFSCSVMHEALHNHYTQKSLSLSPGK

SEQ ID NO: 267 - protein, 560 aa, Artificial Sequence
  Made in Lab - P1785 Activatable Proprotein construct
APASSSTKKTQLQLEHLLLDLQMILNGINNYKNPKLTRMLTFKFYMPKKATELKHLQCLEEELKPLEEALNLAPSKNFHLRPRDLISNINVIVLELKGSETTFMCEYADETATIVEFLNRWITFSQSTISTLTGGSPLGLAGSGRSDNTGGAELCDDDPPEIPHATFKAMAYKEGTMLNCECKRGFRRIKSGSLYMLCTGNSSHSSWDNQCQCTSSATRNTTKQVTPQPEEQKERKTTEMQSPMQPVDQASLPGHCREPPPWENEATERIYHFVVGQMVYYQCVQGYRALHRGPAESVCKMTHGKTRWTQPQLICTGEGGGGSGGGGSEPKSSDKTHTCPPCPAPEAAGGPSVFLFPPKPKDTLMISRTPEVTCVVVDVSHEDPEVKFNWYVDGVEVHNAKTKPREEQYNSTYRVVSVLTVLHQDWLNGKEYKCKVSNKALAAPIEKTISKAKGQPREPQVYTLPPSRDELTKNQVSLTCLVKGFYPSDIAVEWESNGQPENNYKTTPPVLDSDGSFFLYSKLTVDKSRWQQGNVFSCSVMHEALHNHYTQKSLSLSPGK

SEQ ID NO: 268 - protein, 560 aa, Artificial Sequence
  Made in Lab - P1786 Activatable Proprotein construct
APASSSTKKTQLQLEHLLLDLQMILNGINNYKNPKLTRMLTFKFYMPKKATELKHLQCLEEELKPLEEALNLAPSKNFHLRPRDLISNINVIVLELKGSETTFMCEYADETATIVEFLNRWITFSQSTISTLTGGSGGSGGSGGSGGSGGGAELCDDDPPEIPHATFKAMAYKEGTMLNCECKRGFRRIKSGSLYMLCTGNSSHSSWDNQCQCTSSATRNTTKQVTPQPEEQKERKTTEMQSPMQPVDQASLPGHCREPPPWENEATERIYHFVVGQMVYYQCVQGYRALHRGPAESVCKMTHGKTRWTQPQLICTGEGGGGSGGGGSEPKSSDKTHTCPPCPAPEAAGGPSVFLFPPKPKDTLMISRTPEVTCVVVDVSHEDPEVKFNWYVDGVEVHNAKTKPREEQYNSTYRVVSVLTVLHQDWLNGKEYKCKVSNKALAAPIEKTISKAKGQPREPQVYTLPPSRDELTKNQVSLTCLVKGFYPSDIAVEWESNGQPENNYKTTPPVLDSDGSFFLYSKLTVDKSRWQQGNVFSCSVMHEALHNHYTQKSLSLSPGK

SEQ ID NO: 269 - protein, 552 aa, Artificial Sequence
  Made in Lab - P1834 Activatable Proprotein construct
EPKSSDKTHTCPPCPAPEAAGGPSVFLFPPKPKDTLMISRTPEVTCVVVDVSHEDPEVKFNWYVDGVEVHNAKTKPREEQYNSTYRVVSVLTVLHQDWLNGKEYKCKVSNKALAAPIEKTISKAKGQPREPQVYTLPPSRDELTKNQVSLTCLVKGFYPSDIAVEWESNGQPENNYKTTPPVLDSDGSFFLYSKLTVDKSRWQQGNVFSCSVMHEALHNHYTQKSLSLSPGGSPLGLAGSAPASSSTKKTQLQLEHLLLDLQMILNGINNYKNPKLTRMLTFKFYMPKKATELKHLQCLEEELKPLEEALNLAPSKNFHLRPRDLISNINVIVLELKGSETTFMCEYADETATIVEFLNRWITFSQSTISTLTGGGSGRSDNHGGAELCDDDPPEIPHATFKAMAYKEGTMLNCECKRGFRRIKSGSLYMLCTGNSSHSSWDNQCQCTSSATRNTTKQVTPQPEEQKERKTTEMQSPMQPVDQASLPGHCREPPPWENEATERIYHFVVGQMVYYQCVQGYRALHRGPAESVCKMTHGKTRWTQPQLICTGE

SEQ ID NO: 270 - protein, 379 aa, Artificial Sequence
  Made in Lab - P1834 cleaved protein construct
EPKSSDKTHTCPPCPAPEAAGGPSVFLFPPKPKDTLMISRTPEVTCVVVDVSHEDPEVKFNWYVDGVEVHNAKTKPREEQYNSTYRVVSVLTVLHQDWLNGKEYKCKVSNKALAAPIEKTISKAKGQPREPQVYTLPPSRDELTKNQVSLTCLVKGFYPSDIAVEWESNGQPENNYKTTPPVLDSDGSFFLYSKLTVDKSRWQQGNVFSCSVMHEALHNHYTQKSLSLSPGGSPLGLAGSAPASSSTKKTQLQLEHLLLDLQMILNGINNYKNPKLTRMLTFKFYMPKKATELKHLQCLEEELKPLEEALNLAPSKNFHLRPRDLISNINVIVLELKGSETTFMCEYADETATIVEFLNRWITFSQSTISTLTGGGSGR

SEQ ID NO: 271 - protein, 173 aa, Artificial Sequence
  Made in Lab - P1834 cleaved protein construct
SDNHGGAELCDDDPPEIPHATFKAMAYKEGTMLNCECKRGFRRIKSGSLYMLCTGNSSHSSWDNQCQCTSSATRNTTKQVTPQPEEQKERKTTEMQSPMQPVDQASLPGHCREPPPWENEATERIYHFVVGQMVYYQCVQGYRALHRGPAESVCKMTHGKTRWTQPQLICTGE

SEQ ID NO: 272 - protein, 552 aa, Artificial Sequence; identical to SEQ ID NO: 269
  Made in Lab - P1834 cleaved protein construct

SEQ ID NO: 273 - protein, 379 aa, Artificial Sequence; identical to SEQ ID NO: 270
  Made in Lab - P1834 cleaved protein construct

SEQ ID NO: 274 - protein, 173 aa, Artificial Sequence; identical to SEQ ID NO: 271
  Made in Lab - P1834 cleaved protein construct

SEQ ID NO: 275 - protein, 236 aa, Artificial Sequence
  Made in Lab - P1834 cleaved protein construct
EPKSSDKTHTCPPCPAPEAAGGPSVFLFPPKPKDTLMISRTPEVTCVVVDVSHEDPEVKFNWYVDGVEVHNAKTKPREEQYNSTYRVVSVLTVLHQDWLNGKEYKCKVSNKALAAPIEKTISKAKGQPREPQVYTLPPSRDELTKNQVSLTCLVKGFYPSDIAVEWESNGQPENNYKTTPPVLDSDGSFFLYSKLTVDKSRWQQGNVFSCSVMHEALHNHYTQKSLSLSPGGSPLG

SEQ ID NO: 276 - protein, 316 aa, Artificial Sequence
  Made in Lab - P1834 cleaved protein construct
LAGSAPASSSTKKTQLQLEHLLLDLQMILNGINNYKNPKLTRMLTFKFYMPKKATELKHLQCLEEELKPLEEALNLAPSKNFHLRPRDLISNINVIVLELKGSETTFMCEYADETATIVEFLNRWITFSQSTISTLTGGGSGRSDNHGGAELCDDDPPEIPHATFKAMAYKEGTMLNCECKRGFRRIKSGSLYMLCTGNSSHSSWDNQCQCTSSATRNTTKQVTPQPEEQKERKTTEMQSPMQPVDQASLPGHCREPPPWENEATERIYHFVVGQMVYYQCVQGYRALHRGPAESVCKMTHGKTRWTQPQLICTGE

SEQ ID NO: 277 - protein, 552 aa, Artificial Sequence; identical to SEQ ID NO: 269
  Made in Lab - P1834 cleaved protein construct

SEQ ID NO: 278 - protein, 236 aa, Artificial Sequence; identical to SEQ ID NO: 275
  Made in Lab - P1834 cleaved protein construct

SEQ ID NO: 279 - protein, 316 aa, Artificial Sequence; identical to SEQ ID NO: 276
  Made in Lab - P1834 cleaved protein construct

SEQ ID NO: 280 - protein, 382 aa, Artificial Sequence
  Made in Lab - P1834 cleaved protein construct
EPKSSDKTHTCPPCPAPEAAGGPSVFLFPPKPKDTLMISRTPEVTCVVVDVSHEDPEVKFNWYVDGVEVHNAKTKPREEQYNSTYRVVSVLTVLHQDWLNGKEYKCKVSNKALAAPIEKTISKAKGQPREPQVYTLPPSRDELTKNQVSLTCLVKGFYPSDIAVEWESNGQPENNYKTTPPVLDSDGSFFLYSKLTVDKSRWQQGNVFSCSVMHEALHNHYTQKSLSLSPGGSPLGLAGSAPASSSTKKTQLQLEHLLLDLQMILNGINNYKNPKLTRMLTFKFYMPKKATELKHLQCLEEELKPLEEALNLAPSKNFHLRPRDLISNINVIVLELKGSETTFMCEYADETATIVEFLNRWITFSQSTISTLTGGGSGRSDN

SEQ ID NO: 281 - protein, 170 aa, Artificial Sequence
  Made in Lab - P1834 cleaved protein construct
HGGAELCDDDPPEIPHATFKAMAYKEGTMLNCECKRGFRRIKSGSLYMLCTGNSSHSSWDNQCQCTSSATRNTTKQVTPQPEEQKERKTTEMQSPMQPVDQASLPGHCREPPPWENEATERIYHFVVGQMVYYQCVQGYRALHRGPAESVCKMTHGKTRWTQPQLICTGE

SEQ ID NO: 282 - protein, 552 aa, Artificial Sequence; identical to SEQ ID NO: 269
  Made in Lab - P1834 cleaved protein construct

SEQ ID NO: 283 - protein, 382 aa, Artificial Sequence; identical to SEQ ID NO: 280
  Made in Lab - P1834 cleaved protein construct

SEQ ID NO: 284 - protein, 170 aa, Artificial Sequence; identical to SEQ ID NO: 281
  Made in Lab - P1834 cleaved protein construct

SEQ ID NO: 285 - protein, 236 aa, Artificial Sequence; identical to SEQ ID NO: 275
  Made in Lab - P1834 cleaved protein construct

SEQ ID NO: 286 - protein, 143 aa, Artificial Sequence
  Made in Lab - P1834 cleaved protein construct
LAGSAPASSSTKKTQLQLEHLLLDLQMILNGINNYKNPKLTRMLTFKFYMPKKATELKHLQCLEEELKPLEEALNLAPSKNFHLRPRDLISNINVIVLELKGSETTFMCEYADETATIVEFLNRWITFSQSTISTLTGGGSGR

SEQ ID NO: 287 - protein, 173 aa, Artificial Sequence; identical to SEQ ID NO: 271
  Made in Lab - P1834 cleaved protein construct

SEQ ID NO: 288 - protein, 236 aa, Artificial Sequence; identical to SEQ ID NO: 275
  Made in Lab - P1834 cleaved protein construct

SEQ ID NO: 289 - protein, 316 aa, Artificial Sequence; identical to SEQ ID NO: 276
  Made in Lab - P1834 cleaved protein construct

SEQ ID NO: 290 - protein, 143 aa, Artificial Sequence; identical to SEQ ID NO: 286
  Made in Lab - P1834 cleaved protein construct

SEQ ID NO: 291 - protein, 173 aa, Artificial Sequence; identical to SEQ ID NO: 271
  Made in Lab - P1834 cleaved protein construct

SEQ ID NO: 292 - protein, 379 aa, Artificial Sequence; identical to SEQ ID NO: 270
  Made in Lab - P1834 cleaved protein construct

SEQ ID NO: 293 - protein, 236 aa, Artificial Sequence; identical to SEQ ID NO: 275
  Made in Lab - P1834 cleaved protein construct

SEQ ID NO: 294 - protein, 143 aa, Artificial Sequence; identical to SEQ ID NO: 286
  Made in Lab - P1834 cleaved protein construct

SEQ ID NO: 295 - protein, 173 aa, Artificial Sequence; identical to SEQ ID NO: 271
  Made in Lab - P1834 cleaved protein construct

SEQ ID NO: 296 - protein, 552 aa, Artificial Sequence; identical to SEQ ID NO: 269
  Made in Lab - P1834 cleaved protein construct

SEQ ID NO: 297 - protein, 236 aa, Artificial Sequence; identical to SEQ ID NO: 275
  Made in Lab - P1834 cleaved protein construct

SEQ ID NO: 298 - protein, 316 aa, Artificial Sequence; identical to SEQ ID NO: 276
  Made in Lab - P1834 cleaved protein construct

SEQ ID NO: 299 - protein, 379 aa, Artificial Sequence; identical to SEQ ID NO: 270
  Made in Lab - P1834 cleaved protein construct

SEQ ID NO: 300 - protein, 173 aa, Artificial Sequence; identical to SEQ ID NO: 271
  Made in Lab - P1834 cleaved protein construct

SEQ ID NO: 301 - protein, 143 aa, Artificial Sequence; identical to SEQ ID NO: 286
  Made in Lab - P1834 cleaved protein construct

SEQ ID NO: 302 - protein, 236 aa, Artificial Sequence; identical to SEQ ID NO: 275
  Made in Lab - P1834 cleaved protein construct

SEQ ID NO: 303 - protein, 146 aa, Artificial Sequence
  Made in Lab - P1834 cleaved protein construct
LAGSAPASSSTKKTQLQLEHLLLDLQMILNGINNYKNPKLTRMLTFKFYMPKKATELKHLQCLEEELKPLEEALNLAPSKNFHLRPRDLISNINVIVLELKGSETTFMCEYADETATIVEFLNRWITFSQSTISTLTGGGSGRSDN

SEQ ID NO: 304 - protein, 170 aa, Artificial Sequence; identical to SEQ ID NO: 281
  Made in Lab - P1834 cleaved protein construct

SEQ ID NO: 305 - protein, 236 aa, Artificial Sequence; identical to SEQ ID NO: 275
  Made in Lab - P1834 cleaved protein construct

SEQ ID NO: 306 - protein, 316 aa, Artificial Sequence; identical to SEQ ID NO: 276
  Made in Lab - P1834 cleaved protein construct

SEQ ID NO: 307 - protein, 146 aa, Artificial Sequence; identical to SEQ ID NO: 303
  Made in Lab - P1834 cleaved protein construct

SEQ ID NO: 308 - protein, 170 aa, Artificial Sequence; identical to SEQ ID NO: 281
  Made in Lab - P1834 cleaved protein construct

SEQ ID NO: 309 - protein, 382 aa, Artificial Sequence; identical to SEQ ID NO: 280
  Made in Lab - P1834 cleaved protein construct

SEQ ID NO: 310 - protein, 236 aa, Artificial Sequence; identical to SEQ ID NO: 275
  Made in Lab - P1834 cleaved protein construct

SEQ ID NO: 311 - protein, 146 aa, Artificial Sequence; identical to SEQ ID NO: 303
  Made in Lab - P1834 cleaved protein construct

SEQ ID NO: 312 - protein, 170 aa, Artificial Sequence; identical to SEQ ID NO: 281
  Made in Lab - P1834 cleaved protein construct

SEQ ID NO: 313 - protein, 552 aa, Artificial Sequence; identical to SEQ ID NO: 269
  Made in Lab - P1834 cleaved protein construct

SEQ ID NO: 314 - protein, 236 aa, Artificial Sequence; identical to SEQ ID NO: 275
  Made in Lab - P1834 cleaved protein construct

SEQ ID NO: 315 - protein, 316 aa, Artificial Sequence; identical to SEQ ID NO: 276
  Made in Lab - P1834 cleaved protein construct

SEQ ID NO: 316 - protein, 382 aa, Artificial Sequence; identical to SEQ ID NO: 280
  Made in Lab - P1834 cleaved protein construct

SEQ ID NO: 317 - protein, 170 aa, Artificial Sequence; identical to SEQ ID NO: 281
  Made in Lab - P1834 cleaved protein construct

SEQ ID NO: 318 - protein, 146 aa, Artificial Sequence; identical to SEQ ID NO: 303
  Made in Lab - P1834 cleaved protein construct

SEQ ID NO: 319 - protein, 553 aa, Artificial Sequence
  Made in Lab - P1835 Activatable Proprotein construct
EPKSSDKTHTCPPCPAPEAAGGPSVFLFPPKPKDTLMISRTPEVTCVVVDVSHEDPEVKFNWYVDGVEVHNAKTKPREEQYNSTYRVVSVLTVLHQDWLNGKEYKCKVSNKALAAPIEKTISKAKGQPREPQVYTLPPSRDELTKNQVSLTCLVKGFYPSDIAVEWESNGQPENNYKTTPPVLDSDGSFFLYSKLTVDKSRWQQGNVFSCSVMHEALHNHYTQKSLSLSPGGSPLGLAGGSAPASSSTKKTQLQLEHLLLDLQMILNGINNYKNPKLTRMLTFKFYMPKKATELKHLQCLEEELKPLEEALNLAPSKNFHLRPRDLISNINVIVLELKGSETTFMCEYADETATIVEFLNRWITFSQSTISTLTGGGSGRSDNHGGAELCDDDPPEIPHATFKAMAYKEGTMLNCECKRGFRRIKSGSLYMLCTGNSSHSSWDNQCQCTSSATRNTTKQVTPQPEEQKERKTTEMQSPMQPVDQASLPGHCREPPPWENEATERIYHFVVGQMVYYQCVQGYRALHRGPAESVCKMTHGKTRWTQPQLICTGE

SEQ ID NO: 320 - protein, 554 aa, Artificial Sequence
  Made in Lab - P1836 Activatable Proprotein construct
EPKSSDKTHTCPPCPAPEAAGGPSVFLFPPKPKDTLMISRTPEVTCVVVDVSHEDPEVKFNWYVDGVEVHNAKTKPREEQYNSTYRVVSVLTVLHQDWLNGKEYKCKVSNKALAAPIEKTISKAKGQPREPQVYTLPPSRDELTKNQVSLTCLVKGFYPSDIAVEWESNGQPENNYKTTPPVLDSDGSFFLYSKLTVDKSRWQQGNVFSCSVMHEALHNHYTQKSLSLSPGGGSPLGLAGGSAPASSSTKKTQLQLEHLLLDLQMILNGINNYKNPKLTRMLTFKFYMPKKATELKHLQCLEEELKPLEEALNLAPSKNFHLRPRDLISNINVIVLELKGSETTFMCEYADETATIVEFLNRWITFSQSTISTLTGGGSGRSDNHGGAELCDDDPPEIPHATFKAMAYKEGTMLNCECKRGFRRIKSGSLYMLCTGNSSHSSWDNQCQCTSSATRNTTKQVTPQPEEQKERKTTEMQSPMQPVDQASLPGHCREPPPWENEATERIYHFVVGQMVYYQCVQGYRALHRGPAESVCKMTHGKTRWTQPQLICTGE

SEQ ID NO: 321 - protein, 555 aa, Artificial Sequence
  Made in Lab - P1837 Activatable Proprotein construct
EPKSSDKTHTCPPCPAPEAAGGPSVFLFPPKPKDTLMISRTPEVTCVVVDVSHEDPEVKFNWYVDGVEVHNAKTKPREEQYNSTYRVVSVLTVLHQDWLNGKEYKCKVSNKALAAPIEKTISKAKGQPREPQVYTLPPSRDELTKNQVSLTCLVKGFYPSDIAVEWESNGQPENNYKTTPPVLDSDGSFFLYSKLTVDKSRWQQGNVFSCSVMHEALHNHYTQKSLSLSPGGGSPLGLAGGGSAPASSSTKKTQLQLEHLLLDLQMILNGINNYKNPKLTRMLTFKFYMPKKATELKHLQCLEEELKPLEEALNLAPSKNFHLRPRDLISNINVIVLELKGSETTFMCEYADETATIVEFLNRWITFSQSTISTLTGGGSGRSDNHGGAELCDDDPPEIPHATFKAMAYKEGTMLNCECKRGFRRIKSGSLYMLCTGNSSHSSWDNQCQCTSSATRNTTKQVTPQPEEQKERKTTEMQSPMQPVDQASLPGHCREPPPWENEATERIYHFVVGQMVYYQCVQGYRALHRGPAESVCKMTHGKTRWTQPQLICTGE

SEQ ID NO: 322 - protein, 556 aa, Artificial Sequence
  Made in Lab - P1838 Activatable Proprotein construct
EPKSSDKTHTCPPCPAPEAAGGPSVFLFPPKPKDTLMISRTPEVTCVVVDVSHEDPEVKFNWYVDGVEVHNAKTKPREEQYNSTYRVVSVLTVLHQDWLNGKEYKCKVSNKALAAPIEKTISKAKGQPREPQVYTLPPSRDELTKNQVSLTCLVKGFYPSDIAVEWESNGQPENNYKTTPPVLDSDGSFFLYSKLTVDKSRWQQGNVFSCSVMHEALHNHYTQKSLSLSPGGGGSPLGLAGGGSAPASSSTKKTQLQLEHLLLDLQMILNGINNYKNPKLTRMLTFKFYMPKKATELKHLQCLEEELKPLEEALNLAPSKNFHLRPRDLISNINVIVLELKGSETTFMCEYADETATIVEFLNRWITFSQSTISTLTGGGSGRSDNHGGAELCDDDPPEIPHATFKAMAYKEGTMLNCECKRGFRRIKSGSLYMLCTGNSSHSSWDNQCQCTSSATRNTTKQVTPQPEEQKERKTTEMQSPMQPVDQASLPGHCREPPPWENEATERIYHFVVGQMVYYQCVQGYRALHRGPAESVCKMTHGKTRWTQPQLICTGE

SEQ ID NO: 323 - protein, 557 aa, Artificial Sequence
  Made in Lab - P1839 Activatable Proprotein construct
EPKSSDKTHTCPPCPAPEAAGGPSVFLFPPKPKDTLMISRTPEVTCVVVDVSHEDPEVKFNWYVDGVEVHNAKTKPREEQYNSTYRVVSVLTVLHQDWLNGKEYKCKVSNKALAAPIEKTISKAKGQPREPQVYTLPPSRDELTKNQVSLTCLVKGFYPSDIAVEWESNGQPENNYKTTPPVLDSDGSFFLYSKLTVDKSRWQQGNVFSCSVMHEALHNHYTQKSLSLSPGGGGSPLGLAGGGGSAPASSSTKKTQLQLEHLLLDLQMILNGINNYKNPKLTRMLTFKFYMPKKATELKHLQCLEEELKPLEEALNLAPSKNFHLRPRDLISNINVIVLELKGSETTFMCEYADETATIVEFLNRWITFSQSTISTLTGGGSGRSDNHGGAELCDDDPPEIPHATFKAMAYKEGTMLNCECKRGFRRIKSGSLYMLCTGNSSHSSWDNQCQCTSSATRNTTKQVTPQPEEQKERKTTEMQSPMQPVDQASLPGHCREPPPWENEATERIYHFVVGQMVYYQCVQGYRALHRGPAESVCKMTHGKTRWTQPQLICTGE

SEQ ID NO: 324 - protein, 554 aa, Artificial Sequence
  Made in Lab - P1840 Activatable Proprotein construct
EPKSSDKTHTCPPCPAPEAAGGPSVFLFPPKPKDTLMISRTPEVTCVVVDVSHEDPEVKFNWYVDGVEVHNAKTKPREEQYNSTYRVVSVLTVLHQDWLNGKEYKCKVSNKALAAPIEKTISKAKGQPREPQVYTLPPSRDELTKNQVSLTCLVKGFYPSDIAVEWESNGQPENNYKTTPPVLDSDGSFFLYSKLTVDKSRWQQGNVFSCSVMHEALHNHYTQKSLSLSPGGSPLGLAGGSAPASSSTKKTQLQLEHLLLDLQMILNGINNYKNPKLTRMLTFKFYMPKKATELKHLQCLEEELKPLEEALNLAPSKNFHLRPRDLISNINVIVLELKGSETTFMCEYADETATIVEFLNRWITFSQSTISTLTGGGGSGRSDNHGGAELCDDDPPEIPHATFKAMAYKEGTMLNCECKRGFRRIKSGSLYMLCTGNSSHSSWDNQCQCTSSATRNTTKQVTPQPEEQKERKTTEMQSPMQPVDQASLPGHCREPPPWENEATERIYHFVVGQMVYYQCVQGYRALHRGPAESVCKMTHGKTRWTQPQLICTGE

SEQ ID NO: 325 - protein, 555 aa, Artificial Sequence
  Made in Lab - P1841 Activatable Proprotein construct
EPKSSDKTHTCPPCPAPEAAGGPSVFLFPPKPKDTLMISRTPEVTCVVVDVSHEDPEVKFNWYVDGVEVHNAKTKPREEQYNSTYRVVSVLTVLHQDWLNGKEYKCKVSNKALAAPIEKTISKAKGQPREPQVYTLPPSRDELTKNQVSLTCLVKGFYPSDIAVEWESNGQPENNYKTTPPVLDSDGSFFLYSKLTVDKSRWQQGNVFSCSVMHEALHNHYTQKSLSLSPGGSPLGLAGGSAPASSSTKKTQLQLEHLLLDLQMILNGINNYKNPKLTRMLTFKFYMPKKATELKHLQCLEEELKPLEEALNLAPSKNFHLRPRDLISNINVIVLELKGSETTFMCEYADETATIVEFLNRWITFSQSTISTLTGGGGSGRSDNHGGGAELCDDDPPEIPHATFKAMAYKEGTMLNCECKRGFRRIKSGSLYMLCTGNSSHSSWDNQCQCTSSATRNTTKQVTPQPEEQKERKTTEMQSPMQPVDQASLPGHCREPPPWENEATERIYHFVVGQMVYYQCVQGYRALHRGPAESVCKMTHGKTRWTQPQLICTGE

SEQ ID NO: 326 - protein, 556 aa, Artificial Sequence
  Made in Lab - P1842 Activatable Proprotein construct
EPKSSDKTHTCPPCPAPEAAGGPSVFLFPPKPKDTLMISRTPEVTCVVVDVSHEDPEVKFNWYVDGVEVHNAKTKPREEQYNSTYRVVSVLTVLHQDWLNGKEYKCKVSNKALAAPIEKTISKAKGQPREPQVYTLPPSRDELTKNQVSLTCLVKGFYPSDIAVEWESNGQPENNYKTTPPVLDSDGSFFLYSKLTVDKSRWQQGNVFSCSVMHEALHNHYTQKSLSLSPGGSPLGLAGGSAPASSSTKKTQLQLEHLLLDLQMILNGINNYKNPKLTRMLTFKFYMPKKATELKHLQCLEEELKPLEEALNLAPSKNFHLRPRDLISNINVIVLELKGSETTFMCEYADETATIVEFLNRWITFSQSTISTLTGGGGSSGRSDNHGGGAELCDDDPPEIPHATFKAMAYKEGTMLNCECKRGFRRIKSGSLYMLCTGNSSHSSWDNQCQCTSSATRNTTKQVTPQPEEQKERKTTEMQSPMQPVDQASLPGHCREPPPWENEATERIYHFVVGQMVYYQCVQGYRALHRGPAESVCKMTHGKTRWTQPQLICTGE

SEQ ID NO: 327 - protein, 557 aa, Artificial Sequence
  Made in Lab - P1843 Activatable Proprotein construct
EPKSSDKTHTCPPCPAPEAAGGPSVFLFPPKPKDTLMISRTPEVTCVVVDVSHEDPEVKFNWYVDGVEVHNAKTKPREEQYNSTYRVVSVLTVLHQDWLNGKEYKCKVSNKALAAPIEKTISKAKGQPREPQVYTLPPSRDELTKNQVSLTCLVKGFYPSDIAVEWESNGQPENNYKTTPPVLDSDGSFFLYSKLTVDKSRWQQGNVFSCSVMHEALHNHYTQKSLSLSPGGSPLGLAGGSAPASSSTKKTQLQLEHLLLDLQMILNGINNYKNPKLTRMLTFKFYMPKKATELKHLQCLEEELKPLEEALNLAPSKNFHLRPRDLISNINVIVLELKGSETTFMCEYADETATIVEFLNRWITFSQSTISTLTGGGGSSGRSDNHGGGGAELCDDDPPEIPHATFKAMAYKEGTMLNCECKRGFRRIKSGSLYMLCTGNSSHSSWDNQCQCTSSATRNTTKQVTPQPEEQKERKTTEMQSPMQPVDQASLPGHCREPPPWENEATERIYHFVVGQMVYYQCVQGYRALHRGPAESVCKMTHGKTRWTQPQLICTGE

SEQ ID NO: 328 - protein, 558 aa, Artificial Sequence
  Made in Lab - P1844 Activatable Proprotein construct
EPKSSDKTHTCPPCPAPEAAGGPSVFLFPPKPKDTLMISRTPEVTCVVVDVSHEDPEVKFNWYVDGVEVHNAKTKPREEQYNSTYRVVSVLTVLHQDWLNGKEYKCKVSNKALAAPIEKTISKAKGQPREPQVYTLPPSRDELTKNQVSLTCLVKGFYPSDIAVEWESNGQPENNYKTTPPVLDSDGSFFLYSKLTVDKSRWQQGNVFSCSVMHEALHNHYTQKSLSLSPGGSPLGLAGGSAPASSSTKKTQLQLEHLLLDLQMILNGINNYKNPKLTRMLTFKFYMPKKATELKHLQCLEEELKPLEEALNLAPSKNFHLRPRDLISNINVIVLELKGSETTFMCEYADETATIVEFLNRWITFSQSTISTLTGGSGGSSGRSDNHGGGGAELCDDDPPEIPHATFKAMAYKEGTMLNCECKRGFRRIKSGSLYMLCTGNSSHSSWDNQCQCTSSATRNTTKQVTPQPEEQKERKTTEMQSPMQPVDQASLPGHCREPPPWENEATERIYHFVVGQMVYYQCVQGYRALHRGPAESVCKMTHGKTRWTQPQLICTGE

SEQ ID NO: 329 - protein, 559 aa, Artificial Sequence
  Made in Lab - P1845 Activatable Proprotein construct
EPKSSDKTHTCPPCPAPEAAGGPSVFLFPPKPKDTLMISRTPEVTCVVVDVSHEDPEVKFNWYVDGVEVHNAKTKPREEQYNSTYRVVSVLTVLHQDWLNGKEYKCKVSNKALAAPIEKTISKAKGQPREPQVYTLPPSRDELTKNQVSLTCLVKGFYPSDIAVEWESNGQPENNYKTTPPVLDSDGSFFLYSKLTVDKSRWQQGNVFSCSVMHEALHNHYTQKSLSLSPGGSPLGLAGGSAPASSSTKKTQLQLEHLLLDLQMILNGINNYKNPKLTRMLTFKFYMPKKATELKHLQCLEEELKPLEEALNLAPSKNFHLRPRDLISNINVIVLELKGSETTFMCEYADETATIVEFLNRWITFSQSTISTLTGGSGGSSGRSDNHGGSGGAELCDDDPPEIPHATFKAMAYKEGTMLNCECKRGFRRIKSGSLYMLCTGNSSHSSWDNQCQCTSSATRNTTKQVTPQPEEQKERKTTEMQSPMQPVDQASLPGHCREPPPWENEATERIYHFVVGQMVYYQCVQGYRALHRGPAESVCKMTHGKTRWTQPQLICTGE

SEQ ID NO: 330 - protein, 559 aa, Artificial Sequence
  Made in Lab - P1846 Activatable Proprotein construct
EPKSSDKTHTCPPCPAPEAAGGPSVFLFPPKPKDTLMISRTPEVTCVVVDVSHEDPEVKFNWYVDGVEVHNAKTKPREEQYNSTYRVVSVLTVLHQDWLNGKEYKCKVSNKALAAPIEKTISKAKGQPREPQVYTLPPSRDELTKNQVSLTCLVKGFYPSDIAVEWESNGQPENNYKTTPPVLDSDGSFFLYSKLTVDKSRWQQGNVFSCSVMHEALHNHYTQKSLSLSPGGSPLGLAGGSAPASSSTKKTQLQLEHLLLDLQMILNGINNYKNPKLTRMLTFKFYMPKKATELKHLQCLEEELKPLEEALNLAPSKNFHLRPRDLISNINVIVLELKGSETTFMCEYADETATIVEFLNRWITFSQSTISTLTGGSGGSSGRSDNHGGSGGAELCDDDPPEIPHATFKAMAYKEGTMLNCECKRGFRRIKSGSLYMLCTGASSHSSWDNQCQCTSSATRATTKQVTPQPEEQKERKTTEMQSPMQPVDQASLPGHCREPPPWENEATERIYHFVVGQMVYYQCVQGYRALHRGPAESVCKMTHGKTRWTQPQLICTGE

SEQ ID NO: 331 - protein, 559 aa, Artificial Sequence
  Made in Lab - P1847 Activatable Proprotein construct
EPKSSDKTHTCPPCPAPEAAGGPSVFLFPPKPKDTLMISRTPEVTCVVVDVSHEDPEVKFNWYVDGVEVHNAKTKPREEQYNSTYRVVSVLTVLHQDWLNGKEYKCKVSNKALAAPIEKTISKAKGQPREPQVYTLPPSRDELTKNQVSLTCLVKGFYPSDIAVEWESNGQPENNYKTTPPVLDSDGSFFLYSKLTVDKSRWQQGNVFSCSVMHEALHNHYTQKSLSLSPGGSPLGLAGGSAPASSSTKKTQLQLEHLLLDLQMILNGINNYKNPKLTRMLTFKFYMPKKATELKHLQCLEEELKPLEEVLNLAHSKNFHFDPRDVVSNINVFVLELKGSETTFMCEYADETATIVEFLNRWITFSQSIISTLTGGSGGSSGRSDNHGGSGGAELCDDDPPEIPHATFKAMAYKEGTMLNCECKRGFRRIKSGSLYMLCTGNSSHSSWDNQCQCTSSATRNTTKQVTPQPEEQKERKTTEMQSPMQPVDQASLPGHCREPPPWENEATERIYHFVVGQMVYYQCVQGYRALHRGPAESVCKMTHGKTRWTQPQLICTGE

SEQ ID NO: 332 - protein, 558 aa, Artificial Sequence
  Made in Lab - P1848 Activatable Proprotein construct
EPKSSDKTHTCPPCPAPEAAGGPSVFLFPPKPKDTLMISRTPEVTCVVVDVSHEDPEVKFNWYVDGVEVHNAKTKPREEQYNSTYRVVSVLTVLHQDWLNGKEYKCKVSNKALAAPIEKTISKAKGQPREPQVYTLPPSRDELTKNQVSLTCLVKGFYPSDIAVEWESNGQPENNYKTTPPVLDSDGSFFLYSKLTVDKSRWQQGNVFSCSVMHEALHNHYTQKSLSLSPGGGSPLGMLSGGSAPASSSTKKTQLQLEHLLLDLQMILNGINNYKNPKLTRMLTFKFYMPKKATELKHLQCLEEELKPLEEALNLAPSKNFHLRPRDLISNINVIVLELKGSETTFMCEYADETATIVEFLNRWITFSQSTISTLTGGGGSSGRSDNHGGGAELCDDDPPEIPHATFKAMAYKEGTMLNCECKRGFRRIKSGSLYMLCTGNSSHSSWDNQCQCTSSATRNTTKQVTPQPEEQKERKTTEMQSPMQPVDQASLPGHCREPPPWENEATERIYHFVVGQMVYYQCVQGYRALHRGPAESVCKMTHGKTRWTQPQLICTGE

SEQ ID NO: 333 - protein, 558 aa, Artificial Sequence
  Made in Lab - P1849 Activatable Proprotein construct
EPKSSDKTHTCPPCPAPEAAGGPSVFLFPPKPKDTLMISRTPEVTCVVVDVSHEDPEVKFNWYVDGVEVHNAKTKPREEQYNSTYRVVSVLTVLHQDWLNGKEYKCKVSNKALAAPIEKTISKAKGQPREPQVYTLPPSRDELTKNQVSLTCLVKGFYPSDIAVEWESNGQPENNYKTTPPVLDSDGSFFLYSKLTVDKSRWQQGNVFSCSVMHEALHNHYTQKSLSLSPGGGSPLGIAGGGSAPASSSTKKTQLQLEHLLLDLQMILNGINNYKNPKLTRMLTFKFYMPKKATELKHLQCLEEELKPLEEALNLAPSKNFHLRPRDLISNINVIVLELKGSETTFMCEYADETATIVEFLNRWITFSQSTISTLTGGGGSSGRSDNHGGGAELCDDDPPEIPHATFKAMAYKEGTMLNCECKRGFRRIKSGSLYMLCTGNSSHSSWDNQCQCTSSATRNTTKQVTPQPEEQKERKTTEMQSPMQPVDQASLPGHCREPPPWENEATERIYHFVVGQMVYYQCVQGYRALHRGPAESVCKMTHGKTRWTQPQLICTGE

SEQ ID NO: 334 - protein, 558 aa, Artificial Sequence
  Made in Lab - P1850 Activatable Proprotein construct
EPKSSDKTHTCPPCPAPEAAGGPSVFLFPPKPKDTLMISRTPEVTCVVVDVSHEDPEVKFNWYVDGVEVHNAKTKPREEQYNSTYRVVSVLTVLHQDWLNGKEYKCKVSNKALAAPIEKTISKAKGQPREPQVYTLPPSRDELTKNQVSLTCLVKGFYPSDIAVEWESNGQPENNYKTTPPVLDSDGSFFLYSKLTVDKSRWQQGNVFSCSVMHEALHNHYTQKSLSLSPGGGSPVGLLAGGSAPASSSTKKTQLQLEHLLLDLQMILNGINNYKNPKLTRMLTFKFYMPKKATELKHLQCLEEELKPLEEALNLAPSKNFHLRPRDLISNINVIVLELKGSETTFMCEYADETATIVEFLNRWITFSQSTISTLTGGGGSSGRSDNHGGGAELCDDDPPEIPHATFKAMAYKEGTMLNCECKRGFRRIKSGSLYMLCTGNSSHSSWDNQCQCTSSATRNTTKQVTPQPEEQKERKTTEMQSPMQPVDQASLPGHCREPPPWENEATERIYHFVVGQMVYYQCVQGYRALHRGPAESVCKMTHGKTRWTQPQLICTGE

SEQ ID NO: 335 - protein, 556 aa, Artificial Sequence
  Made in Lab - P1946 Activatable Proprotein construct
EPKSSDKTHTCPPCPAPELLGGPSVFLFPPKPKDTLMISRTPEVTCVVVDVSHEDPEVKFNWYVDGVEVHNAKTKPREEQYNSTYRVVSVLTVLHQDWLNGKEYKCKVSNKALPAPIEKTISKAKGQPREPQVYTLPPSREEMTKNQVSLTCLVKGFYPSDIAVEWESNGQPENNYKTTPPVLDSDGSFFLYSKLTVDKSRWQQGNVFSCSVMHEALHNHYTQKSLSLSPGKGGGGSGGGGSAPASSSTKKTQLQLEHLLLDLQMILNGINNYKNPKLTRMLTFKFYMPKKATELKHLQCLEEELKPLEEVLNLAQSKNFHLRPRDLISNINVIVLELKGSETTFMCEYADETATIVEFLNRWITFSQSIISTLTGSGSENLYFQGGSGSELCDDDPPEIPHATFKAMAYKEGTMLNCECKRGFRRIKSGSLYMLCTGNSSHSSWDNQCQCTSSATRNTTKQVTPQPEEQKERKTTEMQSPMQPVDQASLPGHCREPPPWENEATERIYHFVVGQMVYYQCVQGYRALHRGPAESVCKMTHGKTRWTQPQLICTGE

SEQ ID NO: 336 - protein, 385 aa, Artificial Sequence
  Made in Lab - P1946 cleaved protein construct
EPKSSDKTHTCPPCPAPELLGGPSVFLFPPKPKDTLMISRTPEVTCVVVDVSHEDPEVKFNWYVDGVEVHNAKTKPREEQYNSTYRVVSVLTVLHQDWLNGKEYKCKVSNKALPAPIEKTISKAKGQPREPQVYTLPPSREEMTKNQVSLTCLVKGFYPSDIAVEWESNGQPENNYKTTPPVLDSDGSFFLYSKLTVDKSRWQQGNVFSCSVMHEALHNHYTQKSLSLSPGKGGGGSGGGGSAPASSSTKKTQLQLEHLLLDLQMILNGINNYKNPKLTRMLTFKFYMPKKATELKHLQCLEEELKPLEEVLNLAQSKNFHLRPRDLISNINVIVLELKGSETTFMCEYADETATIVEFLNRWITFSQSIISTLTGSGSENLYFQ

SEQ ID NO: 337 - protein, 171 aa, Artificial Sequence
  Made in Lab - P1946 cleaved protein construct
GGSGSELCDDDPPEIPHATFKAMAYKEGTMLNCECKRGFRRIKSGSLYMLCTGNSSHSSWDNQCQCTSSATRNTTKQVTPQPEEQKERKTTEMQSPMQPVDQASLPGHCREPPPWENEATERIYHFVVGQMVYYQCVQGYRALHRGPAESVCKMTHGKTRWTQPQLICTGE

SEQ ID NO: 338 - protein, 556 aa, Artificial Sequence; identical to SEQ ID NO: 335
  Made in Lab - P1946 cleaved protein construct

SEQ ID NO: 339 - protein, 385 aa, Artificial Sequence; identical to SEQ ID NO: 336
  Made in Lab - P1946 cleaved protein construct

SEQ ID NO: 340 - protein, 171 aa, Artificial Sequence; identical to SEQ ID NO: 337
  Made in Lab - P1946 cleaved protein construct

SEQ ID NO: 341 - protein, 556 aa, Artificial Sequence
  Made in Lab - P1947 Activatable Proprotein construct
EPKSSDKTHTCPPCPAPELLGGPSVFLFPPKPKDTLMISRTPEVTCVVVDVSHEDPEVKFNWYVDGVEVHNAKTKPREEQYNSTYRVVSVLTVLHQDWLNGKEYKCKVSNKALPAPIEKTISKAKGQPREPQVYTLPPSREEMTKNQVSLTCLVKGFYPSDIAVEWESNGQPENNYKTTPPVLDSDGSFFLYSKLTVDKSRWQQGNVFSCSVMHEALHNHYTQKSLSLSPGKGGGGSGGGGSAPASSSTKKTQLQLEHLLLDLQMILNGINNYKNPKLTRMLTAKFYMPKKATELKHLQCLEEELKPLEEVLNLAQSKNFHLRPRDLISNINVIVLELKGSETTFMCEYADETATIVEFLNRWITFSQSIISTLTGSGSENLYFQGGSGSELCDDDPPEIPHATFKAMAYKEGTMLNCECKRGFRRIKSGSLYMLCTGNSSHSSWDNQCQCTSSATRNTTKQVTPQPEEQKERKTTEMQSPMQPVDQASLPGHCREPPPWENEATERIYHFVVGQMVYYQCVQGYRALHRGPAESVCKMTHGKTRWTQPQLICTGE

SEQ ID NO: 342 - protein, 556 aa, Artificial Sequence
  Made in Lab - P1948 Activatable Proprotein construct
EPKSSDKTHTCPPCPAPELLGGPSVFLFPPKPKDTLMISRTPEVTCVVVDVSHEDPEVKFNWYVDGVEVHNAKTKPREEQYNSTYRVVSVLTVLHQDWLNGKEYKCKVSNKALPAPIEKTISKAKGQPREPQVYTLPPSREEMTKNQVSLTCLVKGFYPSDIAVEWESNGQPENNYKTTPPVLDSDGSFFLYSKLTVDKSRWQQGNVFSCSVMHEALHNHYTQKSLSLSPGKGGGGSGGGGSAPASSSTKKTQLQLEHLLLDLQMILNGINNYKNPKLTRMLTFKFAMPKKATELKHLQCLEEELKPLEEVLNLAQSKNFHLRPRDLISNINVIVLELKGSETTFMCEYADETATIVEFLNRWITFSQSIISTLTGSGSENLYFQGGSGSELCDDDPPEIPHATFKAMAYKEGTMLNCECKRGFRRIKSGSLYMLCTGNSSHSSWDNQCQCTSSATRNTTKQVTPQPEEQKERKTTEMQSPMQPVDQASLPGHCREPPPWENEATERIYHFVVGQMVYYQCVQGYRALHRGPAESVCKMTHGKTRWTQPQLICTGE

SEQ ID NO: 343 - protein, 556 aa, Artificial Sequence
  Made in Lab - P1949 Activatable Proprotein construct
EPKSSDKTHTCPPCPAPELLGGPSVFLFPPKPKDTLMISRTPEVTCVVVDVSHEDPEVKFNWYVDGVEVHNAKTKPREEQYNSTYRVVSVLTVLHQDWLNGKEYKCKVSNKALPAPIEKTISKAKGQPREPQVYTLPPSREEMTKNQVSLTCLVKGFYPSDIAVEWESNGQPENNYKTTPPVLDSDGSFFLYSKLTVDKSRWQQGNVFSCSVMHEALHNHYTQKSLSLSPGKGGGGSGGGGSAPASSSTKKTQLQLEHLLLDLQMILNGINNYKNPKLTRMLTAKFAMPKKATELKHLQCLEEELKPLEEVLNLAQSKNFHLRPRDLISNINVIVLELKGSETTFMCEYADETATIVEFLNRWITFSQSIISTLTGSGSENLYFQGGSGSELCDDDPPEIPHATFKAMAYKEGTMLNCECKRGFRRIKSGSLYMLCTGNSSHSSWDNQCQCTSSATRNTTKQVTPQPEEQKERKTTEMQSPMQPVDQASLPGHCREPPPWENEATERIYHFVVGQMVYYQCVQGYRALHRGPAESVCKMTHGKTRWTQPQLICTGE

SEQ ID NO: 344 - protein, 218 aa, Artificial Sequence
  Made in Lab - P14501950 Activatable Proprotein construct
DIVMTQTPLSLSVTPGQPASISCRASKSVSTSAYSYMHWYLQKPGQSPQLLIYLASNLESGVPDRFSGSGSGTDFTLKISRVEAEDVGVYYCQHSRELPYTFGQGTKLEIKRTVAAPSVFIFPPSDEQLKSGTASVVCLLNNFYPREAKVQWKVDNALQSGNSQESVTEQDSKDSTYSLSSTLTLSKADYEKHKVYACEVTHQGLSSPVTKSFNRGEC

SEQ ID NO: 345 - protein, 779 aa, Artificial Sequence
  Made in Lab - P14501950 Activatable Proprotein construct
EVQLVQSGAEVKKPGESLKISCKGSGYTFTENIIHWVRQMPGKGLEWIGWFHPGSGSIKYNEKFKDQVTISADKSISTAYLQWSSLKASDTAMYFCARHGGTGRGAMDYWGQGTLVTVSSASTKGPSVFPLAPCSRSTSESTAALGCLVKDYFPEPVTVSWNSGALTSGVHTFPAVLQSSGLYSLSSVVTVPSSSLGTKTYTCNVDHKPSNTKVDKRVESKYEPKSSDKTHTCPPCPAPEAAGGPSVFLFPPKPKDTLMISRTPEVTCVVVDVSHEDPEVKFNWYVDGVEVHNAKTKPREEQYNSTYRVVSVLTVLHQDWLNGKEYKCKVSNKALAAPIEKTISKAKGQPREPQVYTLPPSRDELTKNQVSLTCLVKGFYPSDIAVEWESNGQPENNYKTTPPVLDSDGSFFLYSKLTVDKSRWQQGNVFSCSVMHEALHNHYTQKSLSLSPGGGSPLGLAGGGSAPASSSTKKTQLQLEHLLLDLQMILNGINNYKNPKLTRMLTFKFYMPKKATELKHLQCLEEELKPLEEALNLAPSKNFHLRPRDLISNINVIVLELKGSETTFMCEYADETATIVEFLNRWITFSQSTISTLTGGSGGGSGGGSGGGAELCDDDPPEIPHATFKAMAYKEGTMLNCECKRGFRRIKSGSLYMLCTGNSSHSSWDNQCQCTSSATRNTTKQVTPQPEEQKERKTTEMQSPMQPVDQASLPGHCREPPPWENEATERIYHFVVGQMVYYQCVQGYRALHRGPAESVCKMTHGKTRWTQPQLICTGE

SEQ ID NO: 346 - protein, 218 aa, Artificial Sequence; identical to SEQ ID NO: 344
  Made in Lab - P14501950 cleaved protein construct

SEQ ID NO: 347 - protein, 459 aa, Artificial Sequence
  Made in Lab - P14501950 cleaved protein construct
EVQLVQSGAEVKKPGESLKISCKGSGYTFTENIIHWVRQMPGKGLEWIGWFHPGSGSIKYNEKFKDQVTISADKSISTAYLQWSSLKASDTAMYFCARHGGTGRGAMDYWGQGTLVTVSSASTKGPSVFPLAPCSRSTSESTAALGCLVKDYFPEPVTVSWNSGALTSGVHTFPAVLQSSGLYSLSSVVTVPSSSLGTKTYTCNVDHKPSNTKVDKRVESKYEPKSSDKTHTCPPCPAPEAAGGPSVFLFPPKPKDTLMISRTPEVTCVVVDVSHEDPEVKFNWYVDGVEVHNAKTKPREEQYNSTYRVVSVLTVLHQDWLNGKEYKCKVSNKALAAPIEKTISKAKGQPREPQVYTLPPSRDELTKNQVSLTCLVKGFYPSDIAVEWESNGQPENNYKTTPPVLDSDGSFFLYSKLTVDKSRWQQGNVFSCSVMHEALHNHYTQKSLSLSPGGGSPLG

SEQ ID NO: 348 - protein, 320 aa, Artificial Sequence
  Made in Lab - P14501950 cleaved protein construct
LAGGGSAPASSSTKKTQLQLEHLLLDLQMILNGINNYKNPKLTRMLTFKFYMPKKATELKHLQCLEEELKPLEEALNLAPSKNFHLRPRDLISNINVIVLELKGSETTFMCEYADETATIVEFLNRWITFSQSTISTLTGGSGGGSGGGSGGGAELCDDDPPEIPHATFKAMAYKEGTMLNCECKRGFRRIKSGSLYMLCTGNSSHSSWDNQCQCTSSATRNTTKQVTPQPEEQKERKTTEMQSPMQPVDQASLPGHCREPPPWENEATERIYHFVVGQMVYYQCVQGYRALHRGPAESVCKMTHGKTRWTQPQLICTGE

SEQ ID NO: 349 - protein, 218 aa, Artificial Sequence; identical to SEQ ID NO: 344
  Made in Lab - P14501950 cleaved protein construct

SEQ ID NO: 350 - protein, 779 aa, Artificial Sequence; identical to SEQ ID NO: 345
  Made in Lab - P14501950 cleaved protein construct

SEQ ID NO: 351 - protein, 459 aa, Artificial Sequence; identical to SEQ ID NO: 347
  Made in Lab - P14501950 cleaved protein construct

SEQ ID NO: 352 - protein, 320 aa, Artificial Sequence; identical to SEQ ID NO: 348
  Made in Lab - P14501950 cleaved protein construct

SEQ ID NO: 353 - protein, 218 aa, Artificial Sequence; identical to SEQ ID NO: 344
  Made in Lab - P14501951 Activatable Proprotein construct

SEQ ID NO: 354 - protein, 779 aa, Artificial Sequence
  Made in Lab - P14501951 Activatable Proprotein construct
EVQLVQSGAEVKKPGESLKISCKGSGYTFTENIIHWVRQMPGKGLEWIGWFHPGSGSIKYNEKFKDQVTISADKSISTAYLQWSSLKASDTAMYFCARHGGTGRGAMDYWGQGTLVTVSSASTKGPSVFPLAPCSRSTSESTAALGCLVKDYFPEPVTVSWNSGALTSGVHTFPAVLQSSGLYSLSSVVTVPSSSLGTKTYTCNVDHKPSNTKVDKRVESKYEPKSSDKTHTCPPCPAPEAAGGPSVFLFPPKPKDTLMISRTPEVTCVVVDVSHEDPEVKFNWYVDGVEVHNAKTKPREEQYNSTYRVVSVLTVLHQDWLNGKEYKCKVSNKALAAPIEKTISKAKGQPREPQVYTLPPSRDELTKNQVSLTCLVKGFYPSDIAVEWESNGQPENNYKTTPPVLDSDGSFFLYSKLTVDKSRWQQGNVFSCSVMHEALHNHYTQKSLSLSPGGGSGRSDNHGGAAPASSSTKKTQLQLEHLLLDLQMILNGINNYKNPKLTRMLTFKFYMPKKATELKHLQCLEEELKPLEEALNLAPSKNFHLRPRDLISNINVIVLELKGSETTFMCEYADETATIVEFLNRWITFSQSTISTLTGGSGGGSGGGSGGGAELCDDDPPEIPHATFKAMAYKEGTMLNCECKRGFRRIKSGSLYMLCTGNSSHSSWDNQCQCTSSATRNTTKQVTPQPEEQKERKTTEMQSPMQPVDQASLPGHCREPPPWENEATERIYHFVVGQMVYYQCVQGYRALHRGPAESVCKMTHGKTRWTQPQLICTGE

SEQ ID NO: 355 - protein, 218 aa, Artificial Sequence; identical to SEQ ID NO: 344
  Made in Lab - P14501951 cleaved protein construct

SEQ ID NO: 356 - protein, 458 aa, Artificial Sequence
  Made in Lab - P14501951 cleaved protein construct
EVQLVQSGAEVKKPGESLKISCKGSGYTFTENIIHWVRQMPGKGLEWIGWFHPGSGSIKYNEKFKDQVTISADKSISTAYLQWSSLKASDTAMYFCARHGGTGRGAMDYWGQGTLVTVSSASTKGPSVFPLAPCSRSTSESTAALGCLVKDYFPEPVTVSWNSGALTSGVHTFPAVLQSSGLYSLSSVVTVPSSSLGTKTYTCNVDHKPSNTKVDKRVESKYEPKSSDKTHTCPPCPAPEAAGGPSVFLFPPKPKDTLMISRTPEVTCVVVDVSHEDPEVKFNWYVDGVEVHNAKTKPREEQYNSTYRVVSVLTVLHQDWLNGKEYKCKVSNKALAAPIEKTISKAKGQPREPQVYTLPPSRDELTKNQVSLTCLVKGFYPSDIAVEWESNGQPENNYKTTPPVLDSDGSFFLYSKLTVDKSRWQQGNVFSCSVMHEALHNHYTQKSLSLSPGGGSGR

SEQ ID NO: 357 - protein, 321 aa, Artificial Sequence
  Made in Lab - P14501951 cleaved protein construct
SDNHGGAAPASSSTKKTQLQLEHLLLDLQMILNGINNYKNPKLTRMLTFKFYMPKKATELKHLQCLEEELKPLEEALNLAPSKNFHLRPRDLISNINVIVLELKGSETTFMCEYADETATIVEFLNRWITFSQSTISTLTGGSGGGSGGGSGGGAELCDDDPPEIPHATFKAMAYKEGTMLNCECKRGFRRIKSGSLYMLCTGNSSHSSWDNQCQCTSSATRNTTKQVTPQPEEQKERKTTEMQSPMQPVDQASLPGHCREPPPWENEATERIYHFVVGQMVYYQCVQGYRALHRGPAESVCKMTHGKTRWTQPQLICTGE

SEQ ID NO: 358 - protein, 218 aa, Artificial Sequence; identical to SEQ ID NO: 344
  Made in Lab - P14501951 cleaved protein construct

SEQ ID NO: 359 - protein, 779 aa, Artificial Sequence; identical to SEQ ID NO: 354
  Made in Lab - P14501951 cleaved protein construct

SEQ ID NO: 360 - protein, 458 aa, Artificial Sequence; identical to SEQ ID NO: 356
  Made in Lab - P14501951 cleaved protein construct

SEQ ID NO: 361 - protein, 321 aa, Artificial Sequence; identical to SEQ ID NO: 357
  Made in Lab - P14501951 cleaved protein construct

SEQ ID NO: 362 - protein, 218 aa, Artificial Sequence; identical to SEQ ID NO: 344
  Made in Lab - P14501951 cleaved protein construct

SEQ ID NO: 363 - protein, 461 aa, Artificial Sequence
  Made in Lab - P14501951 cleaved protein construct
EVQLVQSGAEVKKPGESLKISCKGSGYTFTENIIHWVRQMPGKGLEWIGWFHPGSGSIKYNEKFKDQVTISADKSISTAYLQWSSLKASDTAMYFCARHGGTGRGAMDYWGQGTLVTVSSASTKGPSVFPLAPCSRSTSESTAALGCLVKDYFPEPVTVSWNSGALTSGVHTFPAVLQSSGLYSLSSVVTVPSSSLGTKTYTCNVDHKPSNTKVDKRVESKYEPKSSDKTHTCPPCPAPEAAGGPSVFLFPPKPKDTLMISRTPEVTCVVVDVSHEDPEVKFNWYVDGVEVHNAKTKPREEQYNSTYRVVSVLTVLHQDWLNGKEYKCKVSNKALAAPIEKTISKAKGQPREPQVYTLPPSRDELTKNQVSLTCLVKGFYPSDIAVEWESNGQPENNYKTTPPVLDSDGSFFLYSKLTVDKSRWQQGNVFSCSVMHEALHNHYTQKSLSLSPGGGSGRSDN

SEQ ID NO: 364 - protein, 318 aa, Artificial Sequence
  Made in Lab - P14501951 cleaved protein construct
HGGAAPASSSTKKTQLQLEHLLLDLQMILNGINNYKNPKLTRMLTFKFYMPKKATELKHLQCLEEELKPLEEALNLAPSKNFHLRPRDLISNINVIVLELKGSETTFMCEYADETATIVEFLNRWITFSQSTISTLTGGSGGGSGGGSGGGAELCDDDPPEIPHATFKAMAYKEGTMLNCECKRGFRRIKSGSLYMLCTGNSSHSSWDNQCQCTSSATRNTTKQVTPQPEEQKERKTTEMQSPMQPVDQASLPGHCREPPPWENEATERIYHFVVGQMVYYQCVQGYRALHRGPAESVCKMTHGKTRWTQPQLICTGE

SEQ ID NO: 365 - protein, 218 aa, Artificial Sequence; identical to SEQ ID NO: 344
  Made in Lab - P14501951 cleaved protein construct

SEQ ID NO: 366 - protein, 779 aa, Artificial Sequence; identical to SEQ ID NO: 354
  Made in Lab - P14501951 cleaved protein construct

SEQ ID NO: 367 - protein, 461 aa, Artificial Sequence; identical to SEQ ID NO: 363
  Made in Lab - P14501951 cleaved protein construct

SEQ ID NO: 368 - protein, 318 aa, Artificial Sequence; identical to SEQ ID NO: 364
  Made in Lab - P14501951 cleaved protein construct

SEQ ID NO: 369 - protein, 218 aa, Artificial Sequence; identical to SEQ ID NO: 344
  Made in Lab - P14501952 Activatable Proprotein construct

SEQ ID NO: 370 - protein, 779 aa, Artificial Sequence
  Made in Lab - P14501952 Activatable Proprotein construct
EVQLVQSGAEVKKPGESLKISCKGSGYTFTENIIHWVRQMPGKGLEWIGWFHPGSGSIKYNEKFKDQVTISADKSISTAYLQWSSLKASDTAMYFCARHGGTGRGAMDYWGQGTLVTVSSASTKGPSVFPLAPCSRSTSESTAALGCLVKDYFPEPVTVSWNSGALTSGVHTFPAVLQSSGLYSLSSVVTVPSSSLGTKTYTCNVDHKPSNTKVDKRVESKYEPKSSDKTHTCPPCPAPEAAGGPSVFLFPPKPKDTLMISRTPEVTCVVVDVSHEDPEVKFNWYVDGVEVHNAKTKPREEQYNSTYRVVSVLTVLHQDWLNGKEYKCKVSNKALAAPIEKTISKAKGQPREPQVYTLPPSRDELTKNQVSLTCLVKGFYPSDIAVEWESNGQPENNYKTTPPVLDSDGSFFLYSKLTVDKSRWQQGNVFSCSVMHEALHNHYTQKSLSLSPGGGSGGSGGSGGSAPASSSTKKTQLQLEHLLLDLQMILNGINNYKNPKLTRMLTFKFYMPKKATELKHLQCLEEELKPLEEALNLAPSKNFHLRPRDLISNINVIVLELKGSETTFMCEYADETATIVEFLNRWITFSQSTISTLTGGSGGGPLGLAGGGAELCDDDPPEIPHATFKAMAYKEGTMLNCECKRGFRRIKSGSLYMLCTGNSSHSSWDNQCQCTSSATRNTTKQVTPQPEEQKERKTTEMQSPMQPVDQASLPGHCREPPPWENEATERIYHFVVGQMVYYQCVQGYRALHRGPAESVCKMTHGKTRWTQPQLICTGE

SEQ ID NO: 371 - protein, 218 aa, Artificial Sequence; identical to SEQ ID NO: 344
  Made in Lab - P14501952 cleaved protein construct

SEQ ID NO: 372 - protein, 607 aa, Artificial Sequence
  Made in Lab - P14501952 cleaved protein construct
EVQLVQSGAEVKKPGESLKISCKGSGYTFTENIIHWVRQMPGKGLEWIGWFHPGSGSIKYNEKFKDQVTISADKSISTAYLQWSSLKASDTAMYFCARHGGTGRGAMDYWGQGTLVTVSSASTKGPSVFPLAPCSRSTSESTAALGCLVKDYFPEPVTVSWNSGALTSGVHTFPAVLQSSGLYSLSSVVTVPSSSLGTKTYTCNVDHKPSNTKVDKRVESKYEPKSSDKTHTCPPCPAPEAAGGPSVFLFPPKPKDTLMISRTPEVTCVVVDVSHEDPEVKFNWYVDGVEVHNAKTKPREEQYNSTYRVVSVLTVLHQDWLNGKEYKCKVSNKALAAPIEKTISKAKGQPREPQVYTLPPSRDELTKNQVSLTCLVKGFYPSDIAVEWESNGQPENNYKTTPPVLDSDGSFFLYSKLTVDKSRWQQGNVFSCSVMHEALHNHYTQKSLSLSPGGGSGGSGGSGGSAPASSSTKKTQLQLEHLLLDLQMILNGINNYKNPKLTRMLTFKFYMPKKATELKHLQCLEEELKPLEEALNLAPSKNFHLRPRDLISNINVIVLELKGSETTFMCEYADETATIVEFLNRWITFSQSTISTLTGGSGGGPLG

SEQ ID NO: 373 - protein, 172 aa, Artificial Sequence
  Made in Lab - P14501952 cleaved protein construct
LAGGGAELCDDDPPEIPHATFKAMAYKEGTMLNCECKRGFRRIKSGSLYMLCTGNSSHSSWDNQCQCTSSATRNTTKQVTPQPEEQKERKTTEMQSPMQPVDQASLPGHCREPPPWENEATERIYHFVVGQMVYYQCVQGYRALHRGPAESVCKMTHGKTRWTQPQLICTGE

SEQ ID NO: 374 - protein, 218 aa, Artificial Sequence; identical to SEQ ID NO: 344
  Made in Lab - P14501952 cleaved protein construct

SEQ ID NO: 375 - protein, 779 aa, Artificial Sequence; identical to SEQ ID NO: 370
  Made in Lab - P14501952 cleaved protein construct

SEQ ID NO: 376 - protein, 607 aa, Artificial Sequence; identical to SEQ ID NO: 372
  Made in Lab - P14501952 cleaved protein construct

SEQ ID NO: 377 - protein, 172 aa, Artificial Sequence; identical to SEQ ID NO: 373
  Made in Lab - P14501952 cleaved protein construct

SEQ ID NO: 378 - protein, 218 aa, Artificial Sequence; identical to SEQ ID NO: 344
  Made in Lab - P14501953 Activatable Proprotein construct

SEQ ID NO: 379 - protein, 779 aa, Artificial Sequence
  Made in Lab - P14501953 Activatable Proprotein construct
EVQLVQSGAEVKKPGESLKISCKGSGYTFTENIIHWVRQMPGKGLEWIGWFHPGSGSIKYNEKFKDQVTISADKSISTAYLQWSSLKASDTAMYFCARHGGTGRGAMDYWGQGTLVTVSSASTKGPSVFPLAPCSRSTSESTAALGCLVKDYFPEPVTVSWNSGALTSGVHTFPAVLQSSGLYSLSSVVTVPSSSLGTKTYTCNVDHKPSNTKVDKRVESKYEPKSSDKTHTCPPCPAPEAAGGPSVFLFPPKPKDTLMISRTPEVTCVVVDVSHEDPEVKFNWYVDGVEVHNAKTKPREEQYNSTYRVVSVLTVLHQDWLNGKEYKCKVSNKALAAPIEKTISKAKGQPREPQVYTLPPSRDELTKNQVSLTCLVKGFYPSDIAVEWESNGQPENNYKTTPPVLDSDGSFFLYSKLTVDKSRWQQGNVFSCSVMHEALHNHYTQKSLSLSPGGGSGGSGGSGGSAPASSSTKKTQLQLEHLLLDLQMILNGINNYKNPKLTRMLTFKFYMPKKATELKHLQCLEEELKPLEEALNLAPSKNFHLRPRDLISNINVIVLELKGSETTFMCEYADETATIVEFLNRWITFSQSTISTLTGGSGGSGRSDNHGGAELCDDDPPEIPHATFKAMAYKEGTMLNCECKRGFRRIKSGSLYMLCTGNSSHSSWDNQCQCTSSATRNTTKQVTPQPEEQKERKTTEMQSPMQPVDQASLPGHCREPPPWENEATERIYHFVVGQMVYYQCVQGYRALHRGPAESVCKMTHGKTRWTQPQLICTGE

SEQ ID NO: 380 - protein, 218 aa, Artificial Sequence; identical to SEQ ID NO: 344
  Made in Lab - P14501953 cleaved protein construct

SEQ ID NO: 381 - protein, 606 aa, Artificial Sequence
  Made in Lab - P14501953 cleaved protein construct
EVQLVQSGAEVKKPGESLKISCKGSGYTFTENIIHWVRQMPGKGLEWIGWFHPGSGSIKYNEKFKDQVTISADKSISTAYLQWSSLKASDTAMYFCARHGGTGRGAMDYWGQGTLVTVSSASTKGPSVFPLAPCSRSTSESTAALGCLVKDYFPEPVTVSWNSGALTSGVHTFPAVLQSSGLYSLSSVVTVPSSSLGTKTYTCNVDHKPSNTKVDKRVESKYEPKSSDKTHTCPPCPAPEAAGGPSVFLFPPKPKDTLMISRTPEVTCVVVDVSHEDPEVKFNWYVDGVEVHNAKTKPREEQYNSTYRVVSVLTVLHQDWLNGKEYKCKVSNKALAAPIEKTISKAKGQPREPQVYTLPPSRDELTKNQVSLTCLVKGFYPSDIAVEWESNGQPENNYKTTPPVLDSDGSFFLYSKLTVDKSRWQQGNVFSCSVMHEALHNHYTQKSLSLSPGGGSGGSGGSGGSAPASSSTKKTQLQLEHLLLDLQMILNGINNYKNPKLTRMLTFKFYMPKKATELKHLQCLEEELKPLEEALNLAPSKNFHLRPRDLISNINVIVLELKGSETTFMCEYADETATIVEFLNRWITFSQSTISTLTGGSGGSGR

SEQ ID NO: 382 - protein, 173 aa, Artificial Sequence; identical to SEQ ID NO: 271
  Made in Lab - P14501953 cleaved protein construct

SEQ ID NO: 383 - protein, 218 aa, Artificial Sequence; identical to SEQ ID NO: 344
  Made in Lab - P14501953 cleaved protein construct

SEQ ID NO: 384 - protein, 779 aa, Artificial Sequence; identical to SEQ ID NO: 379
  Made in Lab - P14501953 cleaved protein construct

SEQ ID NO: 385 - protein, 606 aa, Artificial Sequence; identical to SEQ ID NO: 381
  Made in Lab - P14501953 cleaved protein construct

SEQ ID NO: 386 - protein, 173 aa, Artificial Sequence; identical to SEQ ID NO: 271
  Made in Lab - P14501953 cleaved protein construct

SEQ ID NO: 387 - protein, 218 aa, Artificial Sequence; identical to SEQ ID NO: 344
  Made in Lab - P14501953 cleaved protein construct

SEQ ID NO: 388 - protein, 609 aa, Artificial Sequence
  Made in Lab - P14501953 cleaved protein construct
EVQLVQSGAEVKKPGESLKISCKGSGYTFTENIIHWVRQMPGKGLEWIGWFHPGSGSIKYNEKFKDQVTISADKSISTAYLQWSSLKASDTAMYFCARHGGTGRGAMDYWGQGTLVTVSSASTKGPSVFPLAPCSRSTSESTAALGCLVKDYFPEPVTVSWNSGALTSGVHTFPAVLQSSGLYSLSSVVTVPSSSLGTKTYTCNVDHKPSNTKVDKRVESKYEPKSSDKTHTCPPCPAPEAAGGPSVFLFPPKPKDTLMISRTPEVTCVVVDVSHEDPEVKFNWYVDGVEVHNAKTKPREEQYNSTYRVVSVLTVLHQDWLNGKEYKCKVSNKALAAPIEKTISKAKGQPREPQVYTLPPSRDELTKNQVSLTCLVKGFYPSDIAVEWESNGQPENNYKTTPPVLDSDGSFFLYSKLTVDKSRWQQGNVFSCSVMHEALHNHYTQKSLSLSPGGGSGGSGGSGGSAPASSSTKKTQLQLEHLLLDLQMILNGINNYKNPKLTRMLTFKFYMPKKATELKHLQCLEEELKPLEEALNLAPSKNFHLRPRDLISNINVIVLELKGSETTFMCEYADETATIVEFLNRWITFSQSTISTLTGGSGGSGRSDN

SEQ ID NO: 389 - protein, 170 aa, Artificial Sequence; identical to SEQ ID NO: 281
  Made in Lab - P14501953 cleaved protein construct

SEQ ID NO: 390 - protein, 218 aa, Artificial Sequence; identical to SEQ ID NO: 344
  Made in Lab - P14501953 cleaved protein construct

SEQ ID NO: 391 - protein, 779 aa, Artificial Sequence; identical to SEQ ID NO: 379
  Made in Lab - P14501953 cleaved protein construct

SEQ ID NO: 392 - protein, 609 aa, Artificial Sequence; identical to SEQ ID NO: 388
  Made in Lab - P14501953 cleaved protein construct

SEQ ID NO: 393 - protein, 170 aa, Artificial Sequence; identical to SEQ ID NO: 281
  Made in Lab - P14501953 cleaved protein construct

SEQ ID NO: 394 - protein, 556 aa, Artificial Sequence
  Made in Lab - P1972 Activatable Proprotein construct
EPKSSDKTHTCPPCPAPELLGGPSVFLFPPKPKDTLMISRTPEVTCVVVDVSHEDPEVKFNWYVDGVEVHNAKTKPREEQYNSTYRVVSVLTVLHQDWLNGKEYKCKVSNKALPAPIEKTISKAKGQPREPQVYTLPPSREEMTKNQVSLTCLVKGFYPSDIAVEWESNGQPENNYKTTPPVLDSDGSFFLYSKLTVDKSRWQQGNVFSCSVMHEALHNHYTQKSLSLSPGKGGGGSGGGGSAPASSSTKKTQLQLEHLLLDLQMILNGINNYKNPKLTRMLTFKFYMPKKATELKHLQCLESELKPLEEVLNLAQSKNFHLRPRDLISNINVIVLELKGSETTFMCEYADETATIVEFLNRWITFSQSIISTLTGSGSENLYFQGGSGSELCDDDPPEIPHATFKAMAYKEGTMLNCECKRGFRRISSGSLYMLCTGNSSHSSWDNQCQCTSSATRNTTKQVTPQPEEQKERKTTEMQSPMQPVDQASLPGHCREPPPWENEATERIYHFVVGQMVYYQCVQGYRALHRGPAESVCKMTHGKTRWTQPQLICTGE

SEQ ID NO: 395 - protein, 385 aa, Artificial Sequence
  Made in Lab - P1972 cleaved protein construct
EPKSSDKTHTCPPCPAPELLGGPSVFLFPPKPKDTLMISRTPEVTCVVVDVSHEDPEVKFNWYVDGVEVHNAKTKPREEQYNSTYRVVSVLTVLHQDWLNGKEYKCKVSNKALPAPIEKTISKAKGQPREPQVYTLPPSREEMTKNQVSLTCLVKGFYPSDIAVEWESNGQPENNYKTTPPVLDSDGSFFLYSKLTVDKSRWQQGNVFSCSVMHEALHNHYTQKSLSLSPGKGGGGSGGGGSAPASSSTKKTQLQLEHLLLDLQMILNGINNYKNPKLTRMLTFKFYMPKKATELKHLQCLESELKPLEEVLNLAQSKNFHLRPRDLISNINVIVLELKGSETTFMCEYADETATIVEFLNRWITFSQSIISTLTGSGSENLYFQ

SEQ ID NO: 396 - protein, 171 aa, Artificial Sequence
  Made in Lab - P1972 cleaved protein construct
GGSGSELCDDDPPEIPHATFKAMAYKEGTMLNCECKRGFRRISSGSLYMLCTGNSSHSSWDNQCQCTSSATRNTTKQVTPQPEEQKERKTTEMQSPMQPVDQASLPGHCREPPPWENEATERIYHFVVGQMVYYQCVQGYRALHRGPAESVCKMTHGKTRWTQPQLICTGE

SEQ ID NO: 397 - protein, 556 aa, Artificial Sequence; identical to SEQ ID NO: 394
  Made in Lab - P1972 cleaved protein construct

SEQ ID NO: 398 - protein, 385 aa, Artificial Sequence; identical to SEQ ID NO: 395
  Made in Lab - P1972 cleaved protein construct

SEQ ID NO: 399 - protein, 171 aa, Artificial Sequence; identical to SEQ ID NO: 396
  Made in Lab - P1972 cleaved protein construct

SEQ ID NO: 400 - protein, 557 aa, Artificial Sequence
  Made in Lab - P2008 Activatable Proprotein construct
EPKSSDKTHTCPPCPAPEAAGGPSVFLFPPKPKDTLMISRTPEVTCVVVDVSHEDPEVKFNWYVDGVEVHNAKTKPREEQYNSTYRVVSVLTVLHQDWLNGKEYKCKVSNKALAAPIEKTISKAKGQPREPQVYTLPPSRDELTKNQVSLTCLVKGFYPSDIAVEWESNGQPENNYKTTPPVLDSDGSFFLYSKLTVDKSRWQQGNVFSCSVMHEALHNHYTQKSLSLSPGGGSPLGLAGGGSAAASSSTKKTQLQLEHLLLDLQMILNGINNYKNPKLTRMLTAKFYMPKKATELKHLQCLEEELKPLEEVLNLAQSKNFHLRPRDLISNINVIVLELKGSETTFMCEYADETATIVEFLNRWITFSQSIISTLTGGSGGSGGSGGSGGAELCDDDPPEIPHATFKAMAYKEGTMLNCECKRGFRRIKSGSLYMLCTGNSSHSSWDNQCQCTSSATRNTTKQVTPQPEEQKERKTTEMQSPMQPVDQASLPGHCREPPPWENEATERIYHFVVGQMVYYQCVQGYRALHRGPAESVCKMTHGKTRWTQPQLICTGE

SEQ ID NO: 401 - protein, 557 aa, Artificial Sequence
  Made in Lab - P2009 Activatable Proprotein construct
EPKSSDKTHTCPPCPAPEAAGGPSVFLFPPKPKDTLMISRTPEVTCVVVDVSHEDPEVKFNWYVDGVEVHNAKTKPREEQYNSTYRVVSVLTVLHQDWLNGKEYKCKVSNKALAAPIEKTISKAKGQPREPQVYTLPPSRDELTKNQVSLTCLVKGFYPSDIAVEWESNGQPENNYKTTPPVLDSDGSFFLYSKLTVDKSRWQQGNVFSCSVMHEALHNHYTQKSLSLSPGGGSPLGLAGGGSAAASSSTKKTQLQLEHLLLDLQMILNGINNYKNPKLTRMLTFKFYMPKKATELKHLQCLEEELKPLEEVLNLAQSKNFHLRPRDLISNINVIVLELKGSETTFMCEYADETATIVEFLNRWITFSQSIISTLTGGSGGSGGSGGSGGAELCDDDPPEIPHATFKAMAYKEGTMLNCECKRGFRRIKSGSLYMLCTGNSSHSSWDNQCQCTSSATRNTTKQVTPQPEEQKERKTTEMQSPMQPVDQASLPGHCREPPPWENEATERIYHFVVGQMVYYQCVQGYRALHRGPAESVCKMTHGKTRWTQPQLICTGE

SEQ ID NO: 402 - protein, 557 aa, Artificial Sequence
  Made in Lab - P2010 Activatable Proprotein construct
EPKSSDKTHTCPPCPAPEAAGGPSVFLFPPKPKDTLMISRTPEVTCVVVDVSHEDPEVKFNWYVDGVEVHNAKTKPREEQYNSTYRVVSVLTVLHQDWLNGKEYKCKVSNKALAAPIEKTISKAKGQPREPQVYTLPPSRDELTKNQVSLTCLVKGFYPSDIAVEWESNGQPENNYKTTPPVLDSDGSFFLYSKLTVDKSRWQQGNVFSCSVMHEALHNHYTQKSLSLSPGGGSPLGLAGGGSAAASSSTKKTQLQLEHLLLDLQMILNGINNYKNPKLTRMLTFKFYMPKKATELKHLQCLEEELKPLEEALNLAPSKNFHLRPRDLISNINVIVLELKGSETTFMCEYADETATIVEFLNRWITFSQSTISTLTGGSGGSGGSGGSGGAELCDDDPPEIPHATFKAMAYKEGTMLNCECKRGFRRIKSGSLYMLCTGNSSHSSWDNQCQCTSSATRNTTKQVTPQPEEQKERKTTEMQSPMQPVDQASLPGHCREPPPWENEATERIYHFVVGQMVYYQCVQGYRALHRGPAESVCKMTHGKTRWTQPQLICTGE

SEQ ID NO: 403 - protein, 557 aa, Artificial Sequence
  Made in Lab - P2011 Activatable Proprotein construct
EPKSSDKTHTCPPCPAPEAAGGPSVFLFPPKPKDTLMISRTPEVTCVVVDVSHEDPEVKFNWYVDGVEVHNAKTKPREEQYNSTYRVVSVLTVLHQDWLNGKEYKCKVSNKALAAPIEKTISKAKGQPREPQVYTLPPSRDELTKNQVSLTCLVKGFYPSDIAVEWESNGQPENNYKTTPPVLDSDGSFFLYSKLTVDKSRWQQGNVFSCSVMHEALHNHYTQKSLSLSPGGGSGGSGGSGGSAAASSSTKKTQLQLEHLLLDLQMILNGINNYKNPKLTRMLTFKFYMPKKATELKHLQCLEEELKPLEEALNLAPSKNFHLRPRDLISNINVIVLELKGSETTFMCEYADETATIVEFLNRWITFSQSTISTLTGGSGGSPLGLAGGGAELCDDDPPEIPHATFKAMAYKEGTMLNCECKRGFRRIKSGSLYMLCTGNSSHSSWDNQCQCTSSATRNTTKQVTPQPEEQKERKTTEMQSPMQPVDQASLPGHCREPPPWENEATERIYHFVVGQMVYYQCVQGYRALHRGPAESVCKMTHGKTRWTQPQLICTGE

SEQ ID NO: 404 - protein, 557 aa, Artificial Sequence
  Made in Lab - P2012 Activatable Proprotein construct
EPKSSDKTHTCPPCPAPEAAGGPSVFLFPPKPKDTLMISRTPEVTCVVVDVSHEDPEVKFNWYVDGVEVHNAKTKPREEQYNSTYRVVSVLTVLHQDWLNGKEYKCKVSNKALAAPIEKTISKAKGQPREPQVYTLPPSRDELTKNQVSLTCLVKGFYPSDIAVEWESNGQPENNYKTTPPVLDSDGSFFLYSKLTVDKSRWQQGNVFSCSVMHEALHNHYTQKSLSLSPGGGSPLGLAGGGSAAASSSTKKTQLQLEHLLLDLQMILNGINNYKNPKLTRMLTFKFYMPKKATELKHLQCLEEELKPLEEALNLAPSKNFHLRPRDLISNINVIVLELKGSETTFMCEYADETATIVEFLNRWITFSQSTISTLTGGSGGSPLGLAGGGAELCDDDPPEIPHATFKAMAYKEGTMLNCECKRGFRRIKSGSLYMLCTGNSSHSSWDNQCQCTSSATRNTTKQVTPQPEEQKERKTTEMQSPMQPVDQASLPGHCREPPPWENEATERIYHFVVGQMVYYQCVQGYRALHRGPAESVCKMTHGKTRWTQPQLICTGE

SEQ ID NO: 405 - protein, 557 aa, Artificial Sequence
  Made in Lab - P2013 Activatable Proprotein construct
EPKSSDKTHTCPPCPAPEAAGGPSVFLFPPKPKDTLYITREPEVTCVVVDVSHEDPEVKFNWYVDGVEVHNAKTKPREEQYNSTYRVVSVLTVLHQDWLNGKEYKCKVSNKALAAPIEKTISKAKGQPREPQVYTLPPSRDELTKNQVSLTCLVKGFYPSDIAVEWESNGQPENNYKTTPPVLDSDGSFFLYSKLTVDKSRWQQGNVFSCSVMHEALHNHYTQKSLSLSPGGGSPLGLAGGGSAAASSSTKKTQLQLEHLLLDLQMILNGINNYKNPKLTRMLTFKFYMPKKATELKHLQCLEEELKPLEEALNLAPSKNFHLRPRDLISNINVIVLELKGSETTFMCEYADETATIVEFLNRWITFSQSTISTLTGGSGGSGGSGGSGGAELCDDDPPEIPHATFKAMAYKEGTMLNCECKRGFRRIKSGSLYMLCTGNSSHSSWDNQCQCTSSATRNTTKQVTPQPEEQKERKTTEMQSPMQPVDQASLPGHCREPPPWENEATERIYHFVVGQMVYYQCVQGYRALHRGPAESVCKMTHGKTRWTQPQLICTGE

SEQ ID NO: 406 - protein, 555 aa, Artificial Sequence
  Made in Lab - P2236 Activatable Proprotein construct
EPKSSDKTHTCPPCPAPEAAGGPSVFLFPPKPKDTLYITREPEVTCVVVDVSHEDPEVKFNWYVDGVEVHNAKTKPREEQYNSTYRVVSVLTVLHQDWLNGKEYKCKVSNKALAAPIEKTISKAKGQPREPQVYTLPPSRDELTKNQVSLTCLVKGFYPSDIAVEWESNGQPENNYKTTPPVLDSDGSFFLYSKLTVDKSRWQQGNVFSCSVMHEALHNHYTQKSLSLSPGKGGSPLGLAGGGSGGSTKKTQLQLEHLLLDLQMILNGINNYKNPKLTRMLTFKFYMPKKATELKHLQCLEEELKPLEEVLNLAQSKNFHLRPRDLISRINVIVLELKGSETTFMCEYADETATIVEFLNRWITFSQSIISTLTGGSGGSGGSGGSGGAELCDDAPPEIPHATFKAMAYKEGTMLNCECKRGFRRIKSGSLYMLCTGNSSHSSWDNQCQCTSSATRNTTKQVTPQPEEQKERKTTEMQSPMQPVDQASLPGHCREPPPWENEATERIYHFVVGQMVYYQCVQGYRALHRGPAESVCKMTHGKTRWTQPQLICTGE

SEQ ID NO: 407 - protein, 555 aa, Artificial Sequence
  Made in Lab - P2237 Activatable Proprotein construct
EPKSSDKTHTCPPCPAPEAAGGPSVFLFPPKPKDTLYITREPEVTCVVVDVSHEDPEVKFNWYVDGVEVHNAKTKPREEQYNSTYRVVSVLTVLHQDWLNGKEYKCKVSNKALAAPIEKTISKAKGQPREPQVYTLPPSRDELTKNQVSLTCLVKGFYPSDIAVEWESNGQPENNYKTTPPVLDSDGSFFLYSKLTVDKSRWQQGNVFSCSVMHEALHNHYTQKSLSLSPGKGGSPLGLAGGGSGGSTKKTQLQLEHLLLDLQMILNGINNYKNPKLTRMLTFKFYMPKKATELKHLQCLEEELKPLEEALNLAPSKNFHLRPRDLISRINVIVLELKGSETTFMCEYADETATIVEFLNRWITFSQSTISTLTGGSGGSGGSGGSGGAELCDDAPPEIPHATFKAMAYKEGTMLNCECKRGFRRIKSGSLYMLCTGNSSHSSWDNQCQCTSSATRNTTKQVTPQPEEQKERKTTEMQSPMQPVDQASLPGHCREPPPWENEATERIYHFVVGQMVYYQCVQGYRALHRGPAESVCKMTHGKTRWTQPQLICTGE

SEQ ID NO: 408 - protein, 555 aa, Artificial Sequence
  Made in Lab - P2238 Activatable Proprotein construct
EPKSSDKTHTCPPCPAPEAAGGPSVFLFPPKPKDTLYITREPEVTCVVVDVSHEDPEVKFNWYVDGVEVHNAKTKPREEQYNSTYRVVSVLTVLHQDWLNGKEYKCKVSNKALAAPIEKTISKAKGQPREPQVYTLPPSRDELTKNQVSLTCLVKGFYPSDIAVEWESNGQPENNYKTTPPVLDSDGSFFLYSKLTVDKSRWQQGNVFSCSVMHEALHNHYTQKSLSLSPGKGGSPLGLAGGGSGGSTKKTQLQLEHLLLDLQMILNGINNYKNPKLTRMLTFKFYMPKKATELKHLQCLEEELKPLEEALNLAPSKNFHLRPRDLISRINVIVLELKGSETTFMCEYADETATIVEFLNRWITFSQSTISTLTGGSGGSGGSGGSGGAELCDDKPPEIPHATFKAMAYKEGTMLNCECKRGFRRIKSGSLYMLCTGNSSHSSWDNQCQCTSSATRNTTKQVTPQPEEQKERKTTEMQSPMQPVDQASLPGHCREPPPWENEATERIYHFVVGQMVYYQCVQGYRALHRGPAESVCKMTHGKTRWTQPQLICTGE

SEQ ID NO: 409 - protein, 555 aa, Artificial Sequence
  Made in Lab - P2239 Activatable Proprotein construct
EPKSSDKTHTCPPCPAPEAAGGPSVFLFPPKPKDTLYITREPEVTCVVVDVSHEDPEVKFNWYVDGVEVHNAKTKPREEQYNSTYRVVSVLTVLHQDWLNGKEYKCKVSNKALAAPIEKTISKAKGQPREPQVYTLPPSRDELTKNQVSLTCLVKGFYPSDIAVEWESNGQPENNYKTTPPVLDSDGSFFLYSKLTVDKSRWQQGNVFSCSVMHEALHNHYTQKSLSLSPGKGGSPLGLAGGGSGGSTKKTQLQLEHLLLDLQMILNGINNYKNPKLTEMLTFKFYMPKKATELKHLQCLEEELKPLEEALNLAPSKNFHLRPRDLISRINVIVLELKGSETTFMCEYADETATIVEFLNRWITFSQSTISTLTGGSGGSGGSGGSGGAELCDDKPPEIPHATFKAMAYKEGTMLNCECKRGFRRIKSGSLYMLCTGNSSHSSWDNQCQCTSSATRNTTKQVTPQPEEQKERKTTEMQSPMQPVDQASLPGHCREPPPWENEATERIYHFVVGQMVYYQCVQGYRALHRGPAESVCKMTHGKTRWTQPQLICTGE

SEQ ID NO: 410 - protein, 555 aa, Artificial Sequence
  Made in Lab - P2240 Activatable Proprotein construct
EPKSSDKTHTCPPCPAPEAAGGPSVFLFPPKPKDTLYITREPEVTCVVVDVSHEDPEVKFNWYVDGVEVHNAKTKPREEQYNSTYRVVSVLTVLHQDWLNGKEYKCKVSNKALAAPIEKTISKAKGQPREPQVYTLPPSRDELTKNQVSLTCLVKGFYPSDIAVEWESNGQPENNYKTTPPVLDSDGSFFLYSKLTVDKSRWQQGNVFSCSVMHEALHNHYTQKSLSLSPGKGGSPLGLAGGGSGGSTKKTQLQLEHLLLDLQMILNGINNYKNPKLTEMLTFKFYMPKKATELKHLQCLEEELKPLEEALNLAPSKNFHLRPRDLISRINVIVLELKGSETTFMCEYADETATIVEFLNRWITFSQSTISTLTGGSGGSGGSGGSGGAELCDDKPPEIPHATFKAMAYKEGTMLNCACKRGFRRIKSGSLYMLCTGNSSHSSWDNQCQCTSSATRNTTKQVTPQPEEQKERKTTEMQSPMQPVDQASLPGHCREPPPWENEATERIYHFVVGQMVYYQCVQGYRALHRGPAESVCKMTHGKTRWTQPQLICTGE

SEQ ID NO: 411 - protein, 555 aa, Artificial Sequence
  Made in Lab - P2241 Activatable Proprotein construct
EPKSSDKTHTCPPCPAPEAAGGPSVFLFPPKPKDTLYITREPEVTCVVVDVSHEDPEVKFNWYVDGVEVHNAKTKPREEQYNSTYRVVSVLTVLHQDWLNGKEYKCKVSNKALAAPIEKTISKAKGQPREPQVYTLPPSRDELTKNQVSLTCLVKGFYPSDIAVEWESNGQPENNYKTTPPVLDSDGSFFLYSKLTVDKSRWQQGNVFSCSVMHEALHNHYTQKSLSLSPGKGGSPLGLAGGGSGGSTKKTQLQLEHLLLDLQMILNGINNYKNPKLTEMLTFKFYMPKKATELKHLQCLEEELKPLEEALNLAPSKNFHLRPRDLISRINVIVLELKGSETTFMCEYADETATIVEFLNRWITFSQSTISTLTGGSGGSGGSGGSGGAELCDDKPPEIPHATFKAMAYKEGTMLNCECKRGFRAIKSGSLYMLCTGNSSHSSWDNQCQCTSSATRNTTKQVTPQPEEQKERKTTEMQSPMQPVDQASLPGHCREPPPWENEATERIYHFVVGQMVYYQCVQGYRALHRGPAESVCKMTHGKTRWTQPQLICTGE

SEQ ID NO: 412 - protein, 555 aa, Artificial Sequence
  Made in Lab - P2242 Activatable Proprotein construct
EPKSSDKTHTCPPCPAPEAAGGPSVFLFPPKPKDTLYITREPEVTCVVVDVSHEDPEVKFNWYVDGVEVHNAKTKPREEQYNSTYRVVSVLTVLHQDWLNGKEYKCKVSNKALAAPIEKTISKAKGQPREPQVYTLPPSRDELTKNQVSLTCLVKGFYPSDIAVEWESNGQPENNYKTTPPVLDSDGSFFLYSKLTVDKSRWQQGNVFSCSVMHEALHNHYTQKSLSLSPGKGGSPLGLAGGGSGGSTKKTQLQLEHLLLDLQMILNGINNYKNPKLTEMLTFKFYMPKKATELKHLQCLEEELKPLEEALNLAPSKNFHLRPRDLISRINVIVLELKGSETTFMCEYADETATIVEFLNRWITFSQSTISTLTGGSGGSGGSGGSGGAELCDDKPPEIPHATFKAMAYKEGTMLNCECKRGFRRIASGSLYMLCTGNSSHSSWDNQCQCTSSATRNTTKQVTPQPEEQKERKTTEMQSPMQPVDQASLPGHCREPPPWENEATERIYHFVVGQMVYYQCVQGYRALHRGPAESVCKMTHGKTRWTQPQLICTGE

SEQ ID NO: 413 - protein, 554 aa, Artificial Sequence
  Made in Lab - P2280 Activatable Proprotein construct
EPKSSDKTHTCPPCPAPEAAGGPSVFLFPPKPKDTLMISRTPEVTCVVVDVSHEDPEVKFNWYVDGVEVHNAKTKPREEQYNSTYRVVSVLTVLHQDWLNGKEYKCKVSNKALAAPIEKTISKAKGQPREPQVYTLPPSRDELTKNQVSLTCLVKGFYPSDIAVEWESNGQPENNYKTTPPVLDSDGSFFLYSKLTVDKSRWQQGNVFSCSVMHEALHNHYTQKSLSLSPGGGSPLGLAGGGSGGSTKKTQLQLEHLLLDLQMILNGINNYKNPKLTEMLTFKFYMPKKATELKHLQCLEEELKPLEEVLNLAQSKNFHLRPRDLISRINVIVLELKGSETTFMCEYADETATIVEFLNRWITFSQSIISTLTGGSGGSGGSGGSGGAELCDDKPPEIPHATFKAMAYKEGTMLNCECKRGFRRIKSGSLYMLCTGNSSHSSWDNQCQCTSSATRNTTKQVTPQPEEQKERKTTEMQSPMQPVDQASLPGHCREPPPWENEATERIYHFVVGQMVYYQCVQGYRALHRGPAESVCKMTHGKTRWTQPQLICTGE

SEQ ID NO: 414 - protein, 554 aa, Artificial Sequence
  Made in Lab - P2281 Activatable Proprotein construct
EPKSSDKTHTCPPCPAPEAAGGPSVFLFPPKPKDTLMISRTPEVTCVVVDVSHEDPEVKFNWYVDGVEVHNAKTKPREEQYNSTYRVVSVLTVLHQDWLNGKEYKCKVSNKALAAPIEKTISKAKGQPREPQVYTLPPSRDELTKNQVSLTCLVKGFYPSDIAVEWESNGQPENNYKTTPPVLDSDGSFFLYSKLTVDKSRWQQGNVFSCSVMHEALHNHYTQKSLSLSPGGGSGGSGGSGGSGGSTKKTQLQLEHLLLDLQMILNGINNYKNPKLTEMLTFKFYMPKKATELKHLQCLEEELKPLEEVLNLAQSKNFHLRPRDLISRINVIVLELKGSETTFMCEYADETATIVEFLNRWITFSQSIISTLTGGSGGSGGSGGSGGAELCDDKPPEIPHATFKAMAYKEGTMLNCECKRGFRRIKSGSLYMLCTGNSSHSSWDNQCQCTSSATRNTTKQVTPQPEEQKERKTTEMQSPMQPVDQASLPGHCREPPPWENEATERIYHFVVGQMVYYQCVQGYRALHRGPAESVCKMTHGKTRWTQPQLICTGE

SEQ ID NO: 415 - protein, 554 aa, Artificial Sequence
  Made in Lab - P2282 Activatable Proprotein construct
EPKSSDKTHTCPPCPAPEAAGGPSVFLFPPKPKDTLMISRTPEVTCVVVDVSHEDPEVKFNWYVDGVEVHNAKTKPREEQYNSTYRVVSVLTVLHQDWLNGKEYKCKVSNKALAAPIEKTISKAKGQPREPQVYTLPPSRDELTKNQVSLTCLVKGFYPSDIAVEWESNGQPENNYKTTPPVLDSDGSFFLYSKLTVDKSRWQQGNVFSCSVMHEALHNHYTQKSLSLSPGGGSGGSGGSGGSGGSTKKTQLQLEHLLLDLQMILNGINNYKNPKLTEMLTFKFYMPKKATELKHLQCLEEELKPLEEALNLAPSKNFHLRPRDLISRINVIVLELKGSETTFMCEYADETATIVEFLNRWITFSQSTISTLTGGSPLGLAGGGSGGAELCDDKPPEIPHATFKAMAYKEGTMLNCECKRGFRRIKSGSLYMLCTGNSSHSSWDNQCQCTSSATRNTTKQVTPQPEEQKERKTTEMQSPMQPVDQASLPGHCREPPPWENEATERIYHFVVGQMVYYQCVQGYRALHRGPAESVCKMTHGKTRWTQPQLICTGE

SEQ ID NO: 416 - protein, 554 aa, Artificial Sequence
  Made in Lab - P2283 Activatable Proprotein construct
EPKSSDKTHTCPPCPAPEAAGGPSVFLFPPKPKDTLMISRTPEVTCVVVDVSHEDPEVKFNWYVDGVEVHNAKTKPREEQYNSTYRVVSVLTVLHQDWLNGKEYKCKVSNKALAAPIEKTISKAKGQPREPQVYTLPPSRDELTKNQVSLTCLVKGFYPSDIAVEWESNGQPENNYKTTPPVLDSDGSFFLYSKLTVDKSRWQQGNVFSCSVMHEALHNHYTQKSLSLSPGGGSGGSGGSGGSGGSTKKTQLQLEHLLLDLQMILNGINNYKNPKLTEMLTFKFYMPKKATELKHLQCLEEELKPLEEALNLAPSKNFHLRPRDLISRINVIVLELKGSETTFMCEYADETATIVEFLNRWITFSQSTISTLTGGSGGSGGSGGSGGAELCDDKPPEIPHATFKAMAYKEGTMLNCECKRGFRRIKSGSLYMLCTGNSSHSSWDNQCQCTSSATRNTTKQVTPQPEEQKERKTTEMQSPMQPVDQASLPGHCREPPPWENEATERIYHFVVGQMVYYQCVQGYRALHRGPAESVCKMTHGKTRWTQPQLICTGE

SEQ ID NO: 417 - protein, 554 aa, Artificial Sequence
  Made in Lab - P2314 Activatable Proprotein construct
EPKSSDKTHTCPPCPAPEAAGGPSVFLFPPKPKDTLYITREPEVTCVVVDVSHEDPEVKFNWYVDGVEVHNAKTKPREEQYNSTYRVVSVLTVLHQDWLNGKEYKCKVSNKALAAPIEKTISKAKGQPREPQVYTLPPSRDELTKNQVSLTCLVKGFYPSDIAVEWESNGQPENNYKTTPPVLDSDGSFFLYSKLTVDKSRWQQGNVFSCSVMHEALHNHYTQKSLSLSPGGGSGGSGGSGGSGGSTKKTQLQLEHLLLDLQMILNGINNYKNPKLTRMLTFKFYMPKKATELKHLQCLEEELKPLEEALNLAPSKNFHLRPRDLISRINVIVLELKGSETTFMCEYADETATIVEFLNRWITFSQSTISTLTGGSPLGLAGGGSGGAELCDDDPPEIPHATFKAMAYKEGTMLNCECKRGFRRIKSGSLYMLCTGNSSHSSWDNQCQCTSSATRNTTKQVTPQPEEQKERKTTEMQSPMQPVDQASLPGHCREPPPWENEATERIYHFVVGQMVYYQCVQGYRALHRGPAESVCKMTHGKTRWTQPQLICTGE

SEQ ID NO: 418 - protein, 554 aa, Artificial Sequence
  Made in Lab - P2315 Activatable Proprotein construct
EPKSSDKTHTCPPCPAPEAAGGPSVFLFPPKPKDTLYITREPEVTCVVVDVSHEDPEVKFNWYVDGVEVHNAKTKPREEQYNSTYRVVSVLTVLHQDWLNGKEYKCKVSNKALAAPIEKTISKAKGQPREPQVYTLPPSRDELTKNQVSLTCLVKGFYPSDIAVEWESNGQPENNYKTTPPVLDSDGSFFLYSKLTVDKSRWQQGNVFSCSVMHEALHNHYTQKSLSLSPGGGSGGSGGSGGSGGSTKKTQLQLEHLLLDLQMILNGINNYKNPKLTRMLTFKFYMPKKATELKHLQCLEEELKPLEEALNLAPSKNFHLRPRDLISRINVIVLELKGSETTFMCEYADETATIVEFLNRWITFSQSTISTLTGGSPLGLAGGGSGGAELCDDDPPEIPHATFKAMAYKEGTMLNCECKRGFRRIASGSLYMLCTGNSSHSSWDNQCQCTSSATRNTTKQVTPQPEEQKERKTTEMQSPMQPVDQASLPGHCREPPPWENEATERIYHFVVGQMVYYQCVQGYRALHRGPAESVCKMTHGKTRWTQPQLICTGE

SEQ ID NO: 419 - protein, 554 aa, Artificial Sequence
  Made in Lab - P2316 Activatable Proprotein construct
EPKSSDKTHTCPPCPAPEAAGGPSVFLFPPKPKDTLYITREPEVTCVVVDVSHEDPEVKFNWYVDGVEVHNAKTKPREEQYNSTYRVVSVLTVLHQDWLNGKEYKCKVSNKALAAPIEKTISKAKGQPREPQVYTLPPSRDELTKNQVSLTCLVKGFYPSDIAVEWESNGQPENNYKTTPPVLDSDGSFFLYSKLTVDKSRWQQGNVFSCSVMHEALHNHYTQKSLSLSPGGGSGGSGGSGGSGGSTKKTQLQLEHLLLDLQMILNGINNYKNPKLTRMLTFKFYMPKKATELKHLQCLEEELKPLEEALNLAPSKNFHLRPRDLISRINVIVLELKGSETTFMCEYADETATIVEFLNRWITFSQSTISTLTGGSGGSGGSGGSGGAELCDDDPPEIPHATFKAMAYKEGTMLNCECKRGFRRIKSGSLYMLCTGNSSHSSWDNQCQCTSSATRNTTKQVTPQPEEQKERKTTEMQSPMQPVDQASLPGHCREPPPWENEATERIYHFVVGQMVYYQCVQGYRALHRGPAESVCKMTHGKTRWTQPQLICTGE

SEQ ID NO: 420 - protein, 238 aa, Artificial Sequence
  Made in Lab - P2236 cleaved protein construct
EPKSSDKTHTCPPCPAPEAAGGPSVFLFPPKPKDTLYITREPEVTCVVVDVSHEDPEVKFNWYVDGVEVHNAKTKPREEQYNSTYRVVSVLTVLHQDWLNGKEYKCKVSNKALAAPIEKTISKAKGQPREPQVYTLPPSRDELTKNQVSLTCLVKGFYPSDIAVEWESNGQPENNYKTTPPVLDSDGSFFLYSKLTVDKSRWQQGNVFSCSVMHEALHNHYTQKSLSLSPGKGGSPLG

SEQ ID NO: 421 - protein, 317 aa, Artificial Sequence
  Made in Lab - P2236 cleaved protein construct
LAGGGSGGSTKKTQLQLEHLLLDLQMILNGINNYKNPKLTRMLTFKFYMPKKATELKHLQCLEEELKPLEEVLNLAQSKNFHLRPRDLISRINVIVLELKGSETTFMCEYADETATIVEFLNRWITFSQSIISTLTGGSGGSGGSGGSGGAELCDDAPPEIPHATFKAMAYKEGTMLNCECKRGFRRIKSGSLYMLCTGNSSHSSWDNQCQCTSSATRNTTKQVTPQPEEQKERKTTEMQSPMQPVDQASLPGHCREPPPWENEATERIYHFVVGQMVYYQCVQGYRALHRGPAESVCKMTHGKTRWTQPQLICTGE

SEQ ID NO: 422 - protein, 555 aa, Artificial Sequence; identical to SEQ ID NO: 406
  Made in Lab - P2236 cleaved protein construct

SEQ ID NO: 423 - protein, 238 aa, Artificial Sequence; identical to SEQ ID NO: 420
  Made in Lab - P2236 cleaved protein construct

SEQ ID NO: 424 - protein, 238 aa, Artificial Sequence; identical to SEQ ID NO: 420
  Made in Lab - P2236 cleaved protein construct

SEQ ID NO: 425 - protein, 237 aa, Artificial Sequence
  Made in Lab - P2012 cleaved protein construct
EPKSSDKTHTCPPCPAPEAAGGPSVFLFPPKPKDTLMISRTPEVTCVVVDVSHEDPEVKFNWYVDGVEVHNAKTKPREEQYNSTYRVVSVLTVLHQDWLNGKEYKCKVSNKALAAPIEKTISKAKGQPREPQVYTLPPSRDELTKNQVSLTCLVKGFYPSDIAVEWESNGQPENNYKTTPPVLDSDGSFFLYSKLTVDKSRWQQGNVFSCSVMHEALHNHYTQKSLSLSPGGGSPLG

SEQ ID NO: 426 - protein, 148 aa, Artificial Sequence
  Made in Lab - P2012 cleaved protein construct
LAGGGSAAASSSTKKTQLQLEHLLLDLQMILNGINNYKNPKLTRMLTFKFYMPKKATELKHLQCLEEELKPLEEALNLAPSKNFHLRPRDLISNINVIVLELKGSETTFMCEYADETATIVEFLNRWITFSQSTISTLTGGSGGSPLG

SEQ ID NO: 427 - protein, 172 aa, Artificial Sequence; identical to SEQ ID NO: 373
  Made in Lab - P2012 cleaved protein construct

SEQ ID NO: 428 - protein, 237 aa, Artificial Sequence; identical to SEQ ID NO: 425
  Made in Lab - P2012 cleaved protein construct

SEQ ID NO: 429 - protein, 148 aa, Artificial Sequence; identical to SEQ ID NO: 426
  Made in Lab - P2012 cleaved protein construct

SEQ ID NO: 430 - protein, 172 aa, Artificial Sequence; identical to SEQ ID NO: 373
  Made in Lab - P2012 cleaved protein construct

SEQ ID NO: 431 - protein, 557 aa, Artificial Sequence; identical to SEQ ID NO: 404
  Made in Lab - P2012 cleaved protein construct

SEQ ID NO: 432 - protein, 385 aa, Artificial Sequence
  Made in Lab - P2012 cleaved protein construct
EPKSSDKTHTCPPCPAPEAAGGPSVFLFPPKPKDTLMISRTPEVTCVVVDVSHEDPEVKFNWYVDGVEVHNAKTKPREEQYNSTYRVVSVLTVLHQDWLNGKEYKCKVSNKALAAPIEKTISKAKGQPREPQVYTLPPSRDELTKNQVSLTCLVKGFYPSDIAVEWESNGQPENNYKTTPPVLDSDGSFFLYSKLTVDKSRWQQGNVFSCSVMHEALHNHYTQKSLSLSPGGGSPLGLAGGGSAAASSSTKKTQLQLEHLLLDLQMILNGINNYKNPKLTRMLTFKFYMPKKATELKHLQCLEEELKPLEEALNLAPSKNFHLRPRDLISNINVIVLELKGSETTFMCEYADETATIVEFLNRWITFSQSTISTLTGGSGGSPLG

SEQ ID NO: 433 - protein, 172 aa, Artificial Sequence; identical to SEQ ID NO: 373
  Made in Lab - P2012 cleaved protein construct

SEQ ID NO: 434 - protein, 557 aa, Artificial Sequence; identical to SEQ ID NO: 404
  Made in Lab - P2012 cleaved protein construct

SEQ ID NO: 435 - protein, 237 aa, Artificial Sequence; identical to SEQ ID NO: 425
  Made in Lab - P2012 cleaved protein construct

SEQ ID NO: 436 - protein, 148 aa, Artificial Sequence; identical to SEQ ID NO: 426
  Made in Lab - P2012 cleaved protein construct

SEQ ID NO: 437 - protein, 172 aa, Artificial Sequence; identical to SEQ ID NO: 373
  Made in Lab - P2012 cleaved protein construct

SEQ ID NO: 438 - protein, 237 aa, Artificial Sequence; identical to SEQ ID NO: 425
  Made in Lab - P2012 cleaved protein construct

SEQ ID NO: 439 - protein, 320 aa, Artificial Sequence
  Made in Lab - P2012 cleaved protein construct
LAGGGSAAASSSTKKTQLQLEHLLLDLQMILNGINNYKNPKLTRMLTFKFYMPKKATELKHLQCLEEELKPLEEALNLAPSKNFHLRPRDLISNINVIVLELKGSETTFMCEYADETATIVEFLNRWITFSQSTISTLTGGSGGSPLGLAGGGAELCDDDPPEIPHATFKAMAYKEGTMLNCECKRGFRRIKSGSLYMLCTGNSSHSSWDNQCQCTSSATRNTTKQVTPQPEEQKERKTTEMQSPMQPVDQASLPGHCREPPPWENEATERIYHFVVGQMVYYQCVQGYRALHRGPAESVCKMTHGKTRWTQPQLICTGE

SEQ ID NO: 440 - protein, 385 aa, Artificial Sequence; identical to SEQ ID NO: 432
  Made in Lab - P2012 cleaved protein construct

SEQ ID NO: 441 - protein, 172 aa, Artificial Sequence; identical to SEQ ID NO: 373
  Made in Lab - P2012 cleaved protein construct

1. An activatable proprotein homodimer, comprising a first polypeptide and a second polypeptide, wherein:
(a) the first polypeptide and the second polypeptide comprise, in an N- to C-terminal orientation, or a C- to N-terminal orientation, a binding moiety, a first linker, an IL-2 protein, a second linker, and an IL-2 binding protein; or
(b) the first polypeptide and the second polypeptide comprise, in an N- to C-terminal orientation, or a C- to N-terminal orientation, a binding moiety, a first linker, an IL-2 binding protein, a second linker, and an IL-2 protein,
wherein the binding moiety of the first polypeptide binds to the binding moiety of the second polypeptide, wherein the IL-2 protein of the first polypeptide binds to the IL-2 binding protein of the second polypeptide, and wherein the IL-2 binding protein of the first polypeptide binds to the IL-2 protein of the second polypeptide, wherein said binding masks a binding site of IL-2 protein(s) that otherwise binds to an IL-2Rβ/γc and/or IL-2Rα/β/γc chain present on the surface of an immune cell in vitro or in vivo, and wherein at least one of the first or the second linker is a cleavable linker; or
(c) the first and the second polypeptide comprise, in an N- to C-terminal orientation, or a C- to N-terminal orientation, an IL-2 protein, a first linker, an IL-2 binding protein, a second linker, and an affinity purification tag; or
(d) the first and the second polypeptide comprise, in an N- to C-terminal orientation, or a C- to N-terminal orientation, an IL-2 binding protein, a first linker, an IL-2 protein, a second linker, and an affinity purification tag,
wherein the IL-2 protein of the first polypeptide binds to the IL-2 binding protein of the second polypeptide, and wherein the IL-2 binding protein of the first polypeptide binds to the IL-2 protein of the second polypeptide, wherein said binding masks a binding site of IL-2 protein(s) that otherwise binds to an IL-2Rβ/γc and/or IL-2Rα/β/γc chain present on the surface of an immune cell in vitro or in vivo, and wherein the first linker is a cleavable linker.

2. The activatable proprotein homodimer of claim 1, wherein the first and second IL-2 proteins comprise, consist, or consist essentially of an amino acid sequence that is at least 80, 85, 90, 95, 98, or 100% identical to an amino acid sequence selected from Table S1, optionally amino acids 21-153 of SEQ ID NO: 1 (full-length wild-type human IL-2), optionally comprising a C145X (X is any amino acid) or a C145S substitution as defined by SEQ ID NO: 1.

3. The activatable proprotein homodimer of claim 1 or 2, wherein the first and second IL-2 proteins comprise, consist, or consist essentially of an amino acid sequence that is at least 80, 85, 90, 95, 98, or 100% identical to SEQ ID NO: 2 (mature human IL-2 with C125S substitution), optionally wherein the IL-2 protein retains the S5125 residue as defined by SEQ ID NO: 2.

4. The activatable proprotein homodimer of any one of claims 1-3, wherein the first and second IL-2 proteins comprise one or more substitutions selected from K35C, R38C, T41C, F42C, E61C, and V69C as defined by SEQ ID NO: 2.

5. The activatable proprotein homodimer of claim 4, wherein the first IL-2 protein forms a disulfide bond with the second IL-2 binding protein, and wherein the second IL-2 protein forms a disulfide bond with the first IL-2 binding protein, optionally via one or more of the cysteines in claim 4 and one or more cysteines in the first and second IL-2 binding proteins(s).

6. The activatable proprotein of any one of claims 1-5, wherein the first and second IL-2 proteins comprise one or more amino acid substitutions at position 69, 74, and/or 128 as defined by SEQ ID NO: 2, optionally wherein the one or more amino acid substitutions are selected from V69A, Q74P, and I128T as defined by SEQ ID NO: 2.

7. The activatable proprotein homodimer of any one of claims 1-6, wherein the first and second IL-2 proteins comprise one or more amino acid substitutions at position T3, R38, F42, Y45, E61, E62, E68, and/or L72 as defined by SEQ ID NO: 2, optionally wherein the one or more amino acid substitutions are selected from T3A; R38A and R38K; F42A, F42G, F42S, F42T, F42Q, F42E, F42N, F42D, F42R, F42K, and F42I; Y45A, Y45G, Y45S, Y45T, Y45Q, Y45E, Y45N, Y45D, Y45R, and Y45K; E61S; E62A and E62L; E68A and E68V; and L72A, L72G, L72S, L72T, L72Q, L72E, L72N, L72D, L72R, and L72K, including combinations thereof, optionally a combination selected from F42A, Y45A, and L72G; R38K, F42Q, Y45N, E62L, and E68V; R38K, F42Q, Y45E, and E68V; R38A, F42I, Y45N, E62L, and E68V; R38K, F42K, Y45R, E62L, and E68V; R38K, F42I, Y45E, and E68V; and R38A, F42A, Y45A, and E62A.

8. The activatable proprotein homodimer of any one of claims 1-7, wherein the first and second IL-2 proteins comprise, consist, or consist essentially of an amino acid sequence that is at least 80, 85, 90, 95, 98, or 100% identical to SEQ ID NO: 3 (mature human IL-2 “D10” variant), optionally wherein the IL-2 protein retains any one or more of the Q74H, L80F, R81D, L85V, I86V, and/or I92F substitutions as defined by SEQ ID NO: 3.

9. The activatable proprotein homodimer of any one of 1-8, wherein the first and second IL-2 binding proteins comprise a first and second IL-2Rα protein, or a first and second antibody or antigen binding fragment thereof that specifically binds to the IL-2 protein(s), optionally a bi-specific antibody or antigen binding fragment thereof.

10. The activatable proprotein homodimer of claim 9, wherein the first and second IL-2Rα proteins comprise, consist, or consist essentially of an amino acid sequence that is at least 80, 85, 90, 95, 98, or 100% to an amino acid sequence selected from Table S2, optionally amino acids 22-187 of SEQ ID NO: 4 (full-length wild-type human IL-2Rα).

11. The activatable proprotein homodimer of claim 9 or 10, wherein the first and second IL-2Rα proteins comprise one or more cysteine substitutions selected from D4C, D6C, N27C, K38C, S39C, L42C, Y43C, I118C, and H120C as defined by SEQ ID NO: 6 (human IL-2Rα Sushi 1 to Sushi 2 domain), and/or a K38S substitution.

12. The activatable proprotein homodimer of any one of claims 9-11, wherein the first IL-2Rα protein forms a disulfide bond with the second IL-2 protein, and wherein the second IL-2Rα protein forms a disulfide bond with the first IL-2 protein, optionally via one or more of the cysteines in claim 11 and one or more cysteines in the IL-2 protein, optionally one or more of the cysteines in claim 4, optionally one or more cysteine pairs selected from IL2-K35C and IL2Rα-D4C, IL2-R38C and IL2Rα-D6C, IL2-R38C and IL2Rα-H120C, IL2-T41C and IL2Rα-I118C, IL2-F42C and IL2Rα-N27C, IL2-E61C and IL2Rα-K38C, IL2-E61C and IL2Rα-S39C, and IL2-V69C and IL2Rα-L42C,
wherein disulfide binding between the IL-2 protein and the IL-2Rα protein masks the binding site of the IL-2 protein that preferentially binds to the IL-2Rα/β/γc chain expressed on T_{regs}.

13. The activatable proprotein homodimer of any one of claims 9-12, wherein first and second IL-2Rα proteins comprise an alanine substitution at position 49 and/or 68 as defined by SEQ ID NO: 6.

14. The activatable proprotein homodimer of claim 9, wherein the first and second antibody or antigen binding fragment thereof that specifically binds to the IL-2 protein is selected from one or more of a whole antibody, Fab, Fab′, F(ab′)2, monospecific Fab2, bispecific Fab2, FV, single chain Fv (scFv), scFV-Fc, nanobody, diabody, camelid, and a minibody, optionally wherein the antibody is NARA1 or an antigen binding fragment thereof.

15. The activatable proprotein homodimer of any one of claims 1-14, wherein the binding moieties of (a) and/or (b) do not bind to the IL-2 protein or the IL-2 binding protein.

16. The activatable proprotein homodimer of any one of claims 1-14, wherein the binding moieties of (a) and/or (b) bind to the IL-2 protein.

17. The activatable proprotein homodimer of any one of claims 1-16, wherein the binding moieties of the first polypeptide and the second polypeptide of (a) and/or (b) bind together, optionally homodimerize, via at least one non-covalent interaction.

18. The activatable proprotein homodimer of any one of claims 1-17, wherein the binding moieties of the first polypeptide and the second polypeptide of (a) and/or (b) bind together, optionally homodimerize, via at least one covalent bond.

19. The activatable proprotein homodimer of claim 18, wherein the at least one covalent bond comprises at least one disulfide bond.

20. The activatable proprotein homodimer of any one of claims 1-19, wherein the binding moieties of the first polypeptide and the second polypeptide of (a) and/or (b) are selected from Table M1.

21. The activatable proprotein homodimer of any one of claims 1-20, wherein the binding moieties of the first polypeptide and the second polypeptide of (a) or (b) comprise an antigen binding domain of an immunoglobulin, including antigen binding fragments and variants thereof.

22. The activatable proprotein of any one of claims 1-21, wherein the binding moieties of the first polypeptide and the second polypeptide of (a) and/or (b) comprise a CH1, CH2, CH3, CH1CH3, CH2CH3, CH1CH2CH3, and/or CL domain of an immunoglobulin, including fragments and variants thereof.

23. The activatable proprotein homodimer of claim 21 or 22, wherein the binding moieties of the first polypeptide and the second polypeptide of (a) and/or (b) comprise, in an N- to C-terminal orientation: (1) an antigen binding domain of an immunoglobulin, including antigen binding fragments and variants thereof; and (2) a CH1, CH2, CH3, CH1CH3, CH2CH3, CH1CH2CH3, and/or CL domain of an immunoglobulin, including fragments and variants thereof.

24. The activatable proprotein homodimer of any one of claims 21-23, wherein the antigen binding domain comprises a VH or VL domain of an immunoglobulin, including antigen binding fragments and variants thereof.

25. The activatable proprotein homodimer of any one of claims 1-24, wherein the binding moieties of the first polypeptide and the second polypeptide of (a) and/or (b) do not bind to an antigen.

26. The activatable proprotein homodimer of any one of claims 1-25, wherein the binding moieties of the first polypeptide and the second polypeptide of (a) and/or (b) comprise a CH2CH3 domain of an immunoglobulin.

27. The activatable proprotein homodimer of any one of claims 21-26, wherein the immunoglobulin is from an immunoglobulin class selected from IgG1, IgG2, IgG3, IgG4, IgA, IgD, IgE, and IgM.

29. The activatable proprotein homodimer of any one of claims 1-28, wherein the binding moieties of the first polypeptide and the second polypeptide of (a) and/or (b) comprise a leucine zipper peptide.

30. The activatable proprotein homodimer of any one of claims 1-29, wherein the affinity purification tag of (c) and/or (d) is selected from a polyhistidine tag (optionally hexahistidine tag), a VSV-G tag, a universal tag, a Strep-tag, an S-tag, an S1-tag, a Phe-tag, a Cys-tag, an Asp-tag, an Arg-tag, a Myc epitope tag, a KT3 epitope tag, an HSV epitope tag, a histidine affinity tag, a hemagglutinin (HA) tag, a FLAG epitope tag, an E2 epitope tag, a V5-tag, a T7-tag, an AU5 epitope tag, and an AU1 epitope tag.

31. The activatable proprotein homodimer of any one of claims 1-30, wherein the cleavable linker comprises a protease cleavage site, optionally wherein the cleavable linker is selected from Table S3.

32. The activatable proprotein homodimer of claim 31, wherein the protease cleavage site is cleavable by a protease selected from one or more of a metalloprotease, a serine protease, a cysteine protease, and an aspartic acid protease.

33. The activatable proprotein homodimer of claim 31 or 32, wherein protease cleavage site is cleavable by a protease selected from one or more of MMP1, MMP2, MMP3, MMP4, MMP5, MMP6, MMP7, MMP8, MMP9, MMP10, MMP11, MMP12, MMP13, MMP14, TEV protease, matriptase, uPA, FAP, Legumain, PSA, Kallikrein, Cathepsin A, and Cathepsin B.

34. The activatable proprotein homodimer of any one of claims 1-33, wherein the first linker and/or the second linker are about 1-50, 1-40, 1-30, 1-20, 1-10, 1-5, 1-4, 1-3 amino acids in length, or about 1, 2, 3, 4, 5, 6, 7, 8, 9, 10, 11, 12, 13, 14, 15, 16 ,17, 18, 19, 20, 21, 22, 23, 24, 25, 26, 27, 28, 29, 30, 31, 32, 33, 34, 35, 36, 37, 38, 39, 40, 41, 42, 43, 44, 45, 46, 47, 48, 49, 50 amino acids in length.

35. The activatable proprotein homodimer of any one of claims 1-34, wherein the first linker of (a) and/or (b) is a cleavable linker, and wherein the second linker of (a) and/or (b) is a non-cleavable linker.

36. The activatable proprotein homodimer of claim 35, wherein cleavage, optionally protease cleavage, of the first linker of (a) and/or (b) exposes the binding site(s) of the first and/or second IL-2 proteins that bind to the IL-2Rβ/γc chain present on the surface of the immune cell in vitro or in vivo.

37. The activatable proprotein homodimer of any one of claims 1-34, wherein the first linker of (a) and/or (b) is a non-cleavable linker, and wherein the second linker of (a) and/or (b) is a cleavable linker.

38. The activatable proprotein homodimer of claim 37, wherein cleavage, optionally protease cleavage, of the second linker of (a) and/or (b) exposes the binding site(s) of the first and/or second IL-2 proteins that bind to the IL-2Rβ/γc chain present on the surface of the immune cell in vitro or in vivo.

39. The activatable proprotein homodimer of any one of claims 1-34, wherein cleavage, optionally protease cleavage, of the first linker of (c) and/or (d) exposes the binding site(s) of the first and/or second IL-2 proteins that bind to the IL-2Rβ/γc chain present on the surface of the immune cell in vitro or in vivo.

40. The activatable proprotein homodimer of any one of claims 1-39, wherein the immune cell is selected from one or more of a T cell, a B cell, a natural killer cell, a monocyte, and a macrophage.

41. The activatable proprotein homodimer of any one of claims 1-40, wherein the first polypeptide and the second polypeptide of (a) comprise, in an N- to C-terminal orientation, the binding moiety, the first linker, the IL-2 protein, the second linker, and the IL-2 binding protein.

42. The activatable proprotein homodimer of any one of claims 1-40, wherein the first polypeptide and the second polypeptide of (a) comprise, in an N- to C-terminal orientation, the IL-2 binding protein, the first linker, the IL-2 protein, the second linker, and the binding moiety.

43. The activatable proprotein homodimer of any one of claims 1-40, wherein the first polypeptide and the second polypeptide of (b) comprise, in an N- to C-terminal orientation, the binding moiety, the first linker, the IL-2 binding protein, the second linker, and the IL-2 protein.

44. The activatable proprotein homodimer of any one of claims 1-40, wherein the first polypeptide and the second polypeptide of (b) comprise, in an N- to C-terminal orientation, the IL-2 protein, the first linker, the IL-2 binding protein, the second linker, and the binding moiety.

45. The activatable proprotein homodimer of any one of claims 1-40, wherein the first polypeptide and the second polypeptide of (c) comprise, in an N- to C-terminal orientation, the IL-2 protein, the first linker, the IL-2 binding protein, the second linker, and the affinity purification tag.

46. The activatable proprotein homodimer of any one of claims 1-40, wherein the first polypeptide and the second polypeptide of (d) comprise, in an N- to C-terminal orientation, the IL-2 binding protein, the first linker, the IL-2 protein, the second linker, and the affinity purification tag.

47. The activatable proprotein homodimer of any one of claims 1-46, wherein the first polypeptide and the second polypeptide comprise, consist, or consist essentially of an amino acid sequence that is at least 80, 85, 90, 95, 98, or 100% identical to a sequence selected from Table S4, optionally wherein the TEV protease cleavage site is replaced with cleavage site cleavable by a human protease, optionally a cleavable linker selected from Table S3.

48. The activatable proprotein homodimer of any one of claims 1-47, which is substantially in homodimeric form in a physiological solution, or under physiological conditions, optionally in vivo conditions.

49. A recombinant nucleic acid molecule encoding the activatable proprotein homodimer of any one of claims 1-48.

50. A vector comprising the recombinant nucleic acid molecule of claim 49.

51. A host cell comprising the recombinant nucleic acid molecule of claim 44 or the vector of claim 50.

52. A method of producing an activatable proprotein, comprising culturing the host cell of claim 51 under culture conditions suitable for the expression of the activatable proprotein homodimer, and isolating the activatable proprotein from the culture.

53. A pharmaceutical composition, comprising the activatable proprotein homodimer of any one of claims 1-48, and a pharmaceutically acceptable carrier.

54. A method of treating disease in a subject, and/or a method of enhancing an immune response in a subject, comprising administering to the subject a therapeutically effective amount of the pharmaceutical composition of claim 53.

55. The method of claim 54, wherein the disease is selected from one or more of a cancer, a viral infection, and an immune disorder.

56. The method of claim 55, wherein the cancer is a primary cancer or a metastatic cancer, and is selected from one or more of melanoma (optionally metastatic melanoma), kidney cancer (optionally renal cell carcinoma), pancreatic cancer, bone cancer, prostate cancer, small cell lung cancer, non-small cell lung cancer (NSCLC), mesothelioma, leukemia (optionally lymphocytic leukemia, chronic myelogenous leukemia, acute myeloid leukemia, or relapsed acute myeloid leukemia), multiple myeloma, lymphoma, hepatoma (hepatocellular carcinoma), sarcoma, B-cell malignancy, breast cancer, ovarian cancer, colorectal cancer, glioma, glioblastoma multiforme, meningioma, pituitary adenoma, vestibular schwannoma, primary CNS lymphoma, primitive neuroectodermal tumor (medulloblastoma), bladder cancer, uterine cancer, esophageal cancer, brain cancer, head and neck cancers, cervical cancer, testicular cancer, thyroid cancer, and stomach cancer.

57. The method of any one of claims 54-56, wherein following administration, the activatable proprotein homodimer is activated through protease cleavage in a cell or tissue, optionally a cancer cell or cancer tissue, which exposes the binding site(s) of the first and/or second IL-2 proteins that bind to the IL-2Rβ/γc chain present on the surface of the immune cell in vitro or in vivo, and thereby generates an activated protein.

58. The method of claim 57, wherein the activated protein binds via the IL-2 protein to the IL-2Rβ/γc chain present on the surface of an immune cell in vitro or in vivo.

59. The method of claim 58, wherein the immune cell is selected from one or more of a T cell, a B cell, a natural killer cell, a monocyte, and a macrophage.

60. The method of any one of claims 57-59, wherein binding between the IL-2 protein(s) and the IL-2 binding protein(s) (optionally disulfide binding between the IL-2 protein(s) and the IL-2Rα protein(s)) in the activated protein masks the binding site of the IL-2 protein(s) that binds to the IL-2Rα/β/γc chain expressed on T_{regs}, and thereby interferes with binding of the activated protein to T_{regs}.

61. The method of any one of claims 54-60, wherein administration and activation of the activatable proprotein increases an immune response in the subject by about or at least about 5, 10, 15, 20, 25, 30, 35, 40, 45, 50, 60, 70, 80, 90, 100, 200, 300, 400, 500, 600, 700, 800, 900, 1000, 2000% or more, relative to a control, optionally wherein the immune response is an anti-cancer or anti-viral immune response.

62. The method of any one of claims 54-61, wherein administration and activation of the activatable proprotein increases cell-killing in the subject by about or at least about 5, 10, 15, 20, 25, 30, 35, 40, 45, 50, 60, 70, 80, 90, 100, 200, 300, 400, 500, 600, 700, 800, 900, 1000, 2000% or more, relative to a control, optionally wherein the cell-killing is cancer cell-killing or virally-infected cell-killing.

63. The method of claim 55, wherein the viral infection is selected from one or more of human immunodeficiency virus (HIV), Hepatitis A, Hepatitis B, Hepatitis C, Hepatitis E, Caliciviruses associated diarrhoea, Rotavirus diarrhoea, Haemophilus influenzae B pneumonia and invasive disease, influenza, measles, mumps, rubella, Parainfluenza associated pneumonia, Respiratory syncytial virus (RSV) pneumonia, Severe Acute Respiratory Syndrome (SARS), Human papillomavirus, Herpes simplex type 2 genital ulcers, Dengue Fever, Japanese encephalitis, Tick-borne encephalitis, West-Nile virus associated disease, Yellow Fever, Epstein-Barr virus, Lassa fever, Crimean-Congo haemorrhagic fever, Ebola haemorrhagic fever, Marburg haemorrhagic fever, Rabies, Rift Valley fever, Smallpox, upper and lower respiratory infections, and poliomyelitis, optionally wherein the subject is HIV-positive.

64. The method of claim 55, wherein the immune disorder is selected from one or more of type 1 diabetes, vasculitis, and an immunodeficiency.

65. The method of any one of claims 54-64, wherein the pharmaceutical composition is administered to the subject by parenteral administration.

66. The method of claim 65, wherein the parenteral administration is intravenous administration.

67. Use of a pharmaceutical composition of claim 53 in the preparation of a medicament for treating a disease in a subject, and/or for enhancing an immune response in a subject.

68. A pharmaceutical composition of claim 53 for use in treating a disease in a subject, and/or for enhancing an immune response in a subject.
